(19) United States
(12) Patent Application Publication
(10) Pub. No.: US 2021/0130485 A1
(43) Pub. Date: May 6, 2021

(54) TRANSFERRIN RECEPTOR-BINDING POLYPEPTIDES AND USES THEREOF

(71) Applicant: Denali Therapeutics Inc., South San Francisco, CA (US)

(72) Inventors: Mark S. Dennis, South San Francisco, CA (US); Mihalis Kariolis, South San Francisco, CA (US); Wanda Kwan, South San Francisco, CA (US); Adam P. Silverman, South San Francisco, CA (US); Zachary K. Sweeney, South San Francisco, CA (US); Joy Yu Zuchero, South San Francisco, CA (US)

(73) Assignee: Denali Therapeutics Inc., South San Francisco, CA (US)

(21) Appl. No.: 16/921,506

(22) Filed: Jul. 6, 2020

Related U.S. Application Data
(63) Continuation of application No. PCT/US2019/012990, filed on Jan. 10, 2019.
(60) Provisional application No. 62/615,914, filed on Jan. 10, 2018.
(60) Provisional application No. 62/631,281, filed on Feb. 15, 2018.
(60) Provisional application No. 62/682,639, filed on Jun. 8, 2018.
(60) Provisional application No. 62/721,275, filed on Aug. 22, 2018.

(51) Int. Cl. C07K 16/28

(52) U.S. Cl. CPC C07K 16/2881; C07K 2317/526; C07K 2317/734; C07K 2317/55; C07K 2317/732; C07K 2317/71

(57) ABSTRACT

The present disclosure relates generally to Fc polypeptide dimers that contain a non-native transferrin receptor (TfR) binding site, do not substantially deplete reticulocytes in vivo, but retain binding to the Fcγ receptor (FcγR). The present disclosure also relates to an Fc polypeptide dimer that contains a non-native site that specifically binds TfR on one of the Fc polypeptides; a modification or modifications on the Fc polypeptide containing the TfR-binding site that reduces FcγR binding when bound to TfR, where the other Fc polypeptide does not contain a TfR-binding site but retains FcγR binding.

### CROSS-REFERENCE TO RELATED APPLICATIONS

[0001] The present application is a continuation of International Application No. PCT/US2019/012990, filed Jan. 10, 2019, which claims priority to U.S. Provisional Patent Application No. 62/615,914, filed on Jan. 10, 2018, U.S. Provisional Patent Application No. 62/631,281, filed on Feb. 15, 2018, U.S. Provisional Patent Application No. 62/682,639, filed on Jun. 8, 2018, and U.S. Provisional Patent Application No. 62/721,275, filed on Aug. 22, 2018, the disclosures of which are incorporated herein by reference in their entirety for all purposes.

### FIELD

[0002] The present disclosure relates to modified Fc polypeptide dimers that bind transferrin receptor (TfR), can induce at least one effector function activity (e.g., antibody-dependent cellular cytotoxicity (ADCC)), but do not result in substantial depletion of reticulocytes.

### BACKGROUND

[0003] TfR has been proposed as a target for receptor-mediated transcytosis of therapeutics across the blood-brain barrier (BBB). While TfR is expressed on the endothelial cells that form the BBB, TfR is also expressed on other cell types, including reticulocytes. Previous work has shown that anti-TfR antibodies can deplete reticulocytes from circulation.

[0004] Because reticulocyte depletion is mediated by effector function activity, this toxicity can be overcome by making modifications that reduce or eliminate effector function. This approach, however, precludes the use of therapeutics where effector function is desired or required.

[0005] Thus, a means for delivering effector function-positive therapeutics to the brain that do not cause reticulocyte depletion would be advantageous.

### SUMMARY

[0006] We have developed Fc polypeptides that have been modified to bind to TfR. These Fc polypeptides are capable of being actively transported into the brain by receptor-mediated transcytosis through binding to TfR at the BBB. Because Fc polypeptides are capable of inducing effector function activity, including ADCC, through binding to Fcγ receptors (FcγR) on immune cells and because TfR is expressed on reticulocytes, simultaneous binding by these polypeptides to reticulocytes and FcγR can lead to reticulocyte depletion. While effector function can be reduced or eliminated by introducing mutations into the Fc polypeptide, this is not desirable in some therapeutic applications.

[0007] The present disclosure is based on the development of modified Fc polypeptide dimers that bind TfR, cross the BBB, and retain effector function activity but do not cause substantial TfR-dependent toxicity, including depletion of reticulocytes. Such dimers can be engineered as described herein.

[0008] In one aspect, the disclosure features a modified Fc polypeptide dimer, or a dimeric fragment thereof, that: (a) comprises a TfR-binding site that specifically binds TfR; (b) is capable of binding an Fcγ receptor (FcγR); and (c) does not substantially deplete reticulocytes in vivo.

[0009] In one aspect, the disclosure features a modified Fc polypeptide dimer, or a dimeric fragment thereof, comprising: (a) a first Fc polypeptide that specifically binds TfR comprising (i) a TfR-binding site and (ii) one or more amino acid modifications that reduce FcγR binding, for example, when bound to TfR (e.g., but has limited or no reduction of FcγR binding when not bound to TfR); and (b) a second Fc polypeptide that does not contain a TfR-binding site or any modifications that reduce FcγR binding.

[0010] In some embodiments of this aspect, the TfR-binding site comprises a modified CH3 domain. In some embodiments, the modified CH3 domain is derived from a human IgG1, IgG2, IgG3, or IgG4 CH3 domain. In particular embodiments, the modified CH3 domain comprises five, six, seven, eight, or nine substitutions in a set of amino acid positions comprising 384, 386, 387, 388, 389, 390, 413, 416, and 421, according to EU numbering. In particular embodiments, the modified CH3 domain further comprises one, two, three, or four substitutions at positions comprising 380, 391, 392, and 415.

[0011] In some embodiments, the modified CH3 domain further comprises one, two, or three substitutions at positions comprising 414, 424, and 426.

[0012] In some embodiments, the modified Fc polypeptide dimer binds to the apical domain of TfR. In some embodiments, the modified Fc polypeptide dimer binds to TfR without inhibiting binding of transferrin to TfR. In particular embodiments, the modified Fc polypeptide dimer binds to an epitope that comprises amino acid 208 of TfR.

[0013] In some embodiments, the modified CH3 domain comprises Trp at position 388. In some embodiments, the modified CH3 domain comprises an aromatic amino acid at position 421. In particular embodiments, the aromatic amino acid at position 421 is Trp or Phe.

[0014] In some embodiments of this aspect, the modified CH3 domain comprises at least one position selected from the following: position 384 is Leu, Tyr, Met, or Val; position 386 is Leu, Thr, His, or Pro; position 387 is Val, Pro, or an acidic amino acid; position 388 is Trp; position 389 is Val, Ser, or Ala; position 413 is Glu, Ala, Ser, Leu, Thr, or Pro; position 416 is Thr or an acidic amino acid; and position 421 is Trp, Tyr, His, or Phe.

[0015] In some embodiments of this aspect, the modified CH3 domain comprises two, three, four, five, six, seven, or eight positions selected from the following: position 384 is Leu, Tyr, Met, or Val; position 386 is Leu, Thr, His, or Pro; position 387 is Val, Pro, or an acidic amino acid; position 388 is Trp; position 389 is Val, Ser, or Ala; position 413 is Glu, Ala, Ser, Leu, Thr, or Pro; position 416 is Thr or an acidic amino acid; and position 421 is Trp, Tyr, His, or Phe.

[0016] In some embodiments of this aspect, the modified CH3 domain comprises Leu or Met at position 384; Leu, His, or Pro at position 386; Val at position 387; Trp at position 388; Val or Ala at position 389; Pro at position 413; Thr at position 416; and/or Trp at position 421.

[0017] In some embodiments, the modified CH3 domain further comprises Ser, Thr, Gln, or Phe at position 391. In some embodiments, the modified CH3 domain further comprises Trp, Tyr, Leu, or Gln at position 380. In some embodiments, the modified CH3 domain further comprises Gln, Phe, or His at position 392. In some embodiments, the modified CH3 domain further comprises Trp at position 380 and/or Gln at position 392.

[0018] In some embodiments, the modified CH3 domain further comprises one, two, or three positions selected from the following: position 414 is Lys, Arg, Gly, or Pro; position 424 is Ser, Thr, Glu, or Lys; and position 426 is Ser, Trp, or Gly.

[0019] In some embodiments, the modified CH3 domain comprises Tyr at position 384, Thr at position 386, Glu or Val and position 387, Trp at position 388, Ser at position 389, Ser or Thr at position 413, Glu at position 416, and/or Phe at position 421. In some embodiments, the modified CH3 domain further comprises Trp, Tyr, Leu, or Gln at position 380. In some embodiments, the modified CH3 domain further comprises Glu at position 415. In some embodiments, the modified CH3 domain further comprises Trp at position 380 and/or Glu at position 415. In some embodiments, the modified CH3 domain comprises Asn at position 390.

[0020] In some embodiments, the modified CH3 domain comprises one or more of the following substitutions: Trp at position 380; Thr at position 386; Trp at position 388; Val at position 389; Ser or Thr at position 413; Glu at position 415; and/or Phe at position 421.

[0021] In some embodiments, the modified CH3 domain has at least 85% identity, at least 90% identity, or at least 95% identity to amino acids 111-217 of any one of SEQ ID NOS:4-29 and 64-127. In particular embodiments, the modified CH3 domain has at least 85% identity, at least 90% identity, or at least 95% identity to amino acids 111-217 of any one of SEQ ID NOS:66, 68, 94, 107-109, 119, and 268-270.

[0022] In some embodiments, the modified CH3 domain has at least 85% identity to amino acids 111-217 of SEQ ID NO:1 with the proviso that the percent identity does not include the set of positions 384, 386, 387, 388, 389, 390, 413, 416, and 421, according to EU numbering.

[0023] In some embodiments, the modified CH3 domain comprises amino acids 154-160 and/or 183-191 of any one of SEQ ID NOS:4-29 and 125-127.

[0024] In some embodiments, the modified CH3 domain comprises at least one position selected from the following: position 380 is Trp, Leu, or Glu; position 384 is Tyr or Phe; position 386 is Thr; position 387 is Glu; position 388 is Trp; position 389 is Ser, Ala, Val, or Asn; position 390 is Ser or Asn; position 413 is Thr or Ser; position 415 is Glu or Ser; position 416 is Glu; and position 421 is Phe. In some embodiments, the modified CH3 domain comprises 2, 3, 4, 5, 6, 7, 8, 9, 10, or 11 positions selected from the following: position 380 is Trp, Leu, or Glu; position 384 is Tyr or Phe; position 386 is Thr; position 387 is Glu; position 388 is Trp; position 389 is Ser, Ala, Val, or Asn; position 390 is Ser or Asn; position 413 is Thr or Ser; position 415 is Glu or Ser; position 416 is Glu; and position 421 is Phe.

[0025] In some embodiments, the modified CH3 domain comprises 11 positions as follows: position 380 is Trp, Leu, or Glu; position 384 is Tyr or Phe; position 386 is Thr; position 387 is Glu; position 388 is Trp; position 389 is Ser, Ala, Val, or Asn; position 390 is Ser or Asn; position 413 is Thr or Ser; position 415 is Glu or Ser; position 416 is Glu; and position 421 is Phe.

[0026] In some embodiments, the modified CH3 domain has at least 85% identity, at least 90% identity, or at least 95% identity to amino acids 111-217 of any one of SEQ ID NOS:4-29 and 64-127. In particular embodiments, the modified CH3 domain has at least 85% identity, at least 90% identity, or at least 95% identity to amino acids 111-217 of any one of SEQ ID NOS:66, 68, 94, 107-109, 119, and 268-270.

[0027] In some embodiments, the residues at at least 5, 6, 7, 8, 9, 10, 11, 12, 13, 14, 15, or 16 of the positions corresponding to positions 380, 384, 386, 384, 388, 389, 390, 391, 392, 413, 414, 415, 416, 421, 424, and 426, according to EU numbering scheme, are not deleted or substituted.

[0028] In some embodiments, the modified CH3 domain comprises a sequence of any one of SEQ ID NOS:38-61 and 131-173.

[0029] In some embodiments of this aspect, the modified CH3 domain further comprises (i) a Trp at position 366 or (ii) a Ser at position 366, an Ala at position 368, and a Val at position 407, according to EU numbering scheme.

[0030] In some embodiments of this aspect, the corresponding unmodified CH3 domain is a human IgG1, IgG2, IgG3, or IgG4 CH3 domain.

[0031] In some embodiments of this aspect, the amino acid modifications that reduce FcγR binding, e.g., when bound to TfR, comprise Ala at position 234 and at position 235, according to EU numbering scheme. In some embodiments, the amino acid modifications that reduce FcγR binding, e.g., when bound to TfR, further comprise Gly at position 329, according to EU numbering scheme.

[0032] In some embodiments of this aspect, the first Fc polypeptide and/or the second Fc polypeptide comprises amino acid modifications that increase serum stability (e.g., serum half-life). In some embodiments, the amino acid modifications that increase serum stability (e.g., serum half-life) comprise Tyr at position 252, Thr at position 254, and Glu at position 256, according to EU numbering scheme. In some embodiments, the amino acid modifications that increase serum stability (e.g., serum half-life) comprise (i) a Leu at position 428 and a Ser at position 434, or (ii) a Ser or Ala at position 434, according to EU numbering scheme.

[0033] In some embodiments of this aspect, the modified Fc polypeptide dimer is further fused to a Fab. In some embodiments, the first Fc polypeptide and/or the second Fc polypeptide is further fused to a Fab.

[0034] In some embodiments, the first Fc polypeptide comprises a knob mutation T366W and the second Fc polypeptide comprises hole mutations T366S, L368A, and Y407V, according to EU numbering scheme. In some embodiments, the first Fc polypeptide comprises hole mutations T366S, L368A, and Y407V and the second Fc polypeptide comprises a knob mutation T366W, according to EU numbering scheme.

[0035] In another aspect, the disclosure features a modified Fc polypeptide dimer, comprising: (a) a first Fc polypeptide that specifically binds TfR comprising a TfR-binding site, amino acid modifications L234A and L235A, and a knob mutation T366W, according to EU numbering scheme, and (b) a second Fc polypeptide that comprises hole mutations T366S, L368A, and Y407V, according to EU numbering scheme, and does not contain a TfR-binding site or any modifications that reduce FcγR binding. In some embodiments, the first Fc polypeptide comprises the sequence of any one of SEQ ID NOS:178, 190, 202, 214, 226, 238, 238, 252, 286, 298, and 310. In some embodiments, the second Fc polypeptide comprises the sequence of SEQ ID NO:397.

[0036] In another aspect, the disclosure features a modified Fc polypeptide dimer, comprising: (a) a first Fc polypeptide that specifically binds TfR comprising a TfR-binding site, amino acid modifications L234A, L235A, and P329G, and a knob mutation T366W, according to EU numbering scheme, and (b) a second Fc polypeptide that comprises hole mutations T366S, L368A, and Y407V, according to EU numbering scheme, and does not contain a TfR-binding site or any modifications that reduce FcγR binding. In some embodiments, the first Fc polypeptide comprises the sequence of any one of SEQ ID NOS:179, 191, 203, 215, 227, 239, 275, 287, 299, and 311. In some embodiments, the second Fc polypeptide comprises the sequence of SEQ ID NO:397.

[0037] In another aspect, the disclosure features a modified Fc polypeptide dimer, comprising: (a) a first Fc polypeptide that specifically binds TfR comprising a TfR-binding site, amino acid modifications L234A and L235A, a knob mutation T366W, and amino acid modifications M252Y, S254T, and T256E, according to EU numbering scheme, and (b) a second Fc polypeptide that comprises hole mutations T366S, L368A, and Y407V, according to EU numbering scheme, and does not contain a TfR-binding site or any modifications that reduce FcγR binding. In some embodiments, the first Fc polypeptide comprises the sequence of any one of SEQ ID NOS:181, 193, 205, 217, 229, 241, 277, 289, 301, and 313. In some embodiments, the second Fc polypeptide comprises the sequence of SEQ ID NO:397.

[0038] In another aspect, the disclosure features a modified Fc polypeptide dimer, comprising: (a) a first Fc polypeptide that specifically binds TfR comprising a TfR-binding site, amino acid modifications L234A and L235A, a knob mutation T366W, and amino acid modification N434S with or without M428L, according to EU numbering scheme, and (b) a second Fc polypeptide that comprises hole mutations T366S, L368A, and Y407V, according to EU numbering scheme, and does not contain a TfR-binding site or any modifications that reduce FcγR binding. In some embodiments, the first Fc polypeptide comprises the sequence of any one of SEQ ID NOS:323, 330, 337, 344, 351, 358, 365, 372, 379, and 386. In some embodiments, the second Fc polypeptide comprises the sequence of SEQ ID NO:397.

[0039] In another aspect, the disclosure features a modified Fc polypeptide dimer, comprising: (a) a first Fc polypeptide that specifically binds TfR comprising a TfR-binding site, amino acid modifications L234A, L235A, and P329G, a knob mutation T366W, and amino acid modifications M252Y, S254T, and T256E, according to EU numbering scheme, and (b) a second Fc polypeptide that comprises hole mutations T366S, L368A, and Y407V, according to EU numbering scheme, and does not contain a TfR-binding site or any modifications that reduce FcγR binding. In some embodiments, the first Fc polypeptide comprises the sequence of any one of SEQ ID NOS:182, 194, 206, 218, 230, 242, 278, 290, 302, and 314. In some embodiments, the second Fc polypeptide comprises the sequence of SEQ ID NO:397.

[0040] In another aspect, the disclosure features a modified Fc polypeptide dimer, comprising: (a) a first Fc polypeptide that specifically binds TfR comprising a TfR-binding site, amino acid modifications L234A, L235A, and P329G, a knob mutation T366W, and amino acid modification N434S with or without M428L, according to EU numbering scheme, and (b) a second Fc polypeptide that comprises hole mutations T366S, L368A, and Y407V, according to EU numbering scheme, and does not contain a TfR-binding site or any modifications that reduce FcγR binding. In some embodiments, the first Fc polypeptide comprises the sequence of any one of SEQ ID NOS:324, 331, 338, 345, 352, 359, 366, 373, 380, and 387. In some embodiments, the second Fc polypeptide comprises the sequence of SEQ ID NO:397.

[0041] In another aspect, the disclosure features a modified Fc polypeptide dimer, comprising: (a) a first Fc polypeptide that specifically binds TfR comprising a TfR-binding site, amino acid modifications L234A and L235A, and a knob mutation T366W, according to EU numbering scheme, and (b) a second Fc polypeptide that comprises hole mutations T366S, L368A, and Y407V and amino acid modifications M252Y, S254T, and T256E, according to EU numbering scheme, and does not contain a TfR-binding site or any modifications that reduce FcγR binding. In some embodiments, the first Fc polypeptide comprises the sequence of any one of SEQ ID NOS:178, 190, 202, 214, 226, 238, 252, 286, 298, and 310. In some embodiments, the second Fc polypeptide comprises the sequence of SEQ ID NO:400.

[0042] In another aspect, the disclosure features a modified Fc polypeptide dimer, comprising: (a) a first Fc polypeptide that specifically binds TfR comprising a TfR-binding site, amino acid modifications L234A and L235A, and a knob mutation T366W, according to EU numbering scheme, and (b) a second Fc polypeptide that comprises hole mutations T366S, L368A, and Y407V and amino acid modification N434S with or without M428L, according to EU numbering scheme, and does not contain a TfR-binding site or any modifications that reduce FcγR binding. In some embodiments, the first Fc polypeptide comprises the sequence of any one of SEQ ID NOS:178, 190, 202, 214, 226, 238, 252, 286, 298, and 310. In some embodiments, the second Fc polypeptide comprises the sequence of SEQ ID NO:407.

[0043] In another aspect, the disclosure features a modified Fc polypeptide dimer, comprising: (a) a first Fc polypeptide that specifically binds TfR comprising a TfR-binding site, amino acid modifications L234A, L235A, and P329G, and a knob mutation T366W, according to EU numbering scheme, and (b) a second Fc polypeptide that comprises hole mutations T366S, L368A, and Y407V and amino acid modifications M252Y, S254T, and T256E, according to EU numbering scheme, and does not contain a TfR-binding site or any modifications that reduce FcγR binding. In some embodiments, the first Fc polypeptide comprises the sequence of any one of SEQ ID NOS:179, 191, 203, 215, 227, 239, 275, 287, 299, and 311. In some embodiments, the second Fc polypeptide comprises the sequence of SEQ ID NO:400.

[0044] In another aspect, the disclosure features a modified Fc polypeptide dimer, comprising: (a) a first Fc polypeptide that specifically binds TfR comprising a TfR-binding site, amino acid modifications L234A, L235A, and P329G, and a knob mutation T366W, according to EU numbering scheme, and (b) a second Fc polypeptide that comprises hole mutations T366S, L368A, and Y407V and amino acid modification N434S with or without M428L, according to EU numbering scheme, and does not contain a TfR-binding site or any modifications that reduce FcγR binding. In some embodiments, the first Fc polypeptide comprises the sequence of any one of SEQ ID NOS:179, 191, 203, 215, 227, 239, 275, 287, 299, and 311. In some embodiments, the second Fc polypeptide comprises the sequence of SEQ ID NO:407.

[0045] In another aspect, the disclosure features a modified Fc polypeptide dimer, comprising: (a) a first Fc polypeptide that specifically binds TfR comprising a TfR-binding site, amino acid modifications L234A and L235A, a knob mutation T366W, and amino acid modifications M252Y, S254T, and T256E, according to EU numbering scheme, and (b) a second Fc polypeptide that comprises hole mutations T366S, L368A, and Y407V and amino acid modifications M252Y, S254T, and T256E, according to EU numbering scheme, and does not contain a TfR-binding site or any modifications that reduce FcγR binding. In some embodiments, the first Fc polypeptide comprises the sequence of any one of SEQ ID NOS:181, 193, 205, 217, 229, 241, 277, 289, 301, and 313. In some embodiments, the second Fc polypeptide comprises the sequence of SEQ ID NO:400.

[0046] In another aspect, the disclosure features a modified Fc polypeptide dimer, comprising: (a) a first Fc polypeptide that specifically binds TfR comprising a TfR-binding site, amino acid modifications L234A and L235A, a knob mutation T366W, and amino acid modification N434S with or without M428L, according to EU numbering scheme, and (b) a second Fc polypeptide that comprises hole mutations T366S, L368A, and Y407V and amino acid modification N434S with or without M428L, according to EU numbering scheme, and does not contain a TfR-binding site or any modifications that reduce FcγR binding. In some embodiments, the first Fc polypeptide comprises the sequence of any one of SEQ ID NOS:323, 330, 337, 344, 351, 358, 365, 372, 379, and 386. In some embodiments, the second Fc polypeptide comprises the sequence of SEQ ID NO:407.

[0047] In another aspect, the disclosure features a modified Fc polypeptide dimer, comprising: (a) a first Fc polypeptide that specifically binds TfR comprising a TfR-binding site, amino acid modifications L234A, L235A, and P329G, a knob mutation T366W, and amino acid modifications M252Y, S254T, and T256E, according to EU numbering scheme, and (b) a second Fc polypeptide that comprises hole mutations T366S, L368A, and Y407V and amino acid modifications M252Y, S254T, and T256E, according to EU numbering scheme, and does not contain a TfR-binding site or any modifications that reduce FcγR binding. In some embodiments, the first Fc polypeptide comprises the sequence of any one of SEQ ID NOS:182, 194, 206, 218, 230, 242, 278, 290, 302, and 314. In some embodiments, the second Fc polypeptide comprises the sequence of SEQ ID NO:400.

[0048] In another aspect, the disclosure features a modified Fc polypeptide dimer, comprising: (a) a first Fc polypeptide that specifically binds TfR comprising a TfR-binding site, amino acid modifications L234A, L235A, and P329G, a knob mutation T366W, and amino acid modification N434S with or without M428L, according to EU numbering scheme, and (b) a second Fc polypeptide that comprises hole mutations T366S, L368A, and Y407V and amino acid modification N434S with or without M428L, according to EU numbering scheme, and does not contain a TfR-binding site or any modifications that reduce FcγR binding. In some embodiments, the first Fc polypeptide comprises the sequence of any one of SEQ ID NOS:324, 331, 338, 345, 352, 359, 366, 373, 380, and 387. In some embodiments, the second Fc polypeptide comprises the sequence of SEQ ID NO:407.

[0049] In another aspect, the disclosure features a modified Fc polypeptide dimer, comprising: (a) a first Fc polypeptide that specifically binds TfR comprising a TfR-binding site, amino acid modifications L234A and L235A, and hole mutations T366S, L368A, and Y407V, according to EU numbering scheme, and (b) a second Fc polypeptide that comprises a knob mutation T366W, according to EU numbering scheme, and does not contain a TfR-binding site or any modifications that reduce FcγR binding. In some embodiments, the first Fc polypeptide comprises the sequence of any one of SEQ ID NOS:184, 196, 208, 220, 232, 244, 280, 292, 304, and 316. In some embodiments, the second Fc polypeptide comprises the sequence of SEQ ID NO:391.

[0050] In another aspect, the disclosure features a modified Fc polypeptide dimer, comprising: (a) a first Fc polypeptide that specifically binds TfR comprising a TfR-binding site, amino acid modifications L234A, L235A, and P329G, and hole mutations T366S, L368A, and Y407V, according to EU numbering scheme, and (b) a second Fc polypeptide that comprises a knob mutation T366W, according to EU numbering scheme, and does not contain a TfR-binding site or any modifications that reduce FcγR binding. In some embodiments, the first Fc polypeptide comprises the sequence of any one of SEQ ID NOS:185, 197, 209, 221, 233, 245, 281, 293, 305, and 317. In some embodiments, the second Fc polypeptide comprises the sequence of SEQ ID NO:391.

[0051] In another aspect, the disclosure features a modified Fc polypeptide dimer, comprising: (a) a first Fc polypeptide that specifically binds TfR comprising a TfR-binding site, amino acid modifications L234A and L235A, hole mutations T366S, L368A, and Y407V, and amino acid modifications M252Y, S254T, and T256E, according to EU numbering scheme, and (b) a second Fc polypeptide that comprises a knob mutation T366W according to EU numbering scheme, and does not contain a TfR-binding site or any modifications that reduce FcγR binding. In some embodiments, the first Fc polypeptide comprises the sequence of any one of SEQ ID NOS:187, 199, 211, 223, 235, 247, 283, 295, 307, and 319. In some embodiments, the second Fc polypeptide comprises the sequence of SEQ ID NO:391.

[0052] In another aspect, the disclosure features a modified Fc polypeptide dimer, comprising: (a) a first Fc polypeptide that specifically binds TfR comprising a TfR-binding site, amino acid modifications L234A and L235A, hole mutations T366S, L368A, and Y407V, and amino acid modification N434S with or without M428L, according to EU numbering scheme, and (b) a second Fc polypeptide that comprises a knob mutation T366W according to EU numbering scheme, and does not contain a TfR-binding site or any modifications that reduce FcγR binding. In some embodiments, the first Fc polypeptide comprises the sequence of any one of SEQ ID NOS:326, 333, 340, 347, 354, 361, 368, 375, 382, and 389. In some embodiments, the second Fc polypeptide comprises the sequence of SEQ ID NO:391.

[0053] In another aspect, the disclosure features a modified Fc polypeptide dimer, comprising: (a) a first Fc polypeptide that specifically binds TfR comprising a TfR-binding site, amino acid modifications L234A, L235A, and P329G, hole mutations T366S, L368A, and Y407V, and amino acid modifications M252Y, S254T, and T256E, according to EU numbering scheme, and (b) a second Fc polypeptide that comprises a knob mutation T366W, according to EU numbering scheme, and does not contain a TfR-binding site or any modifications that reduce FcγR binding. In some embodiments, the first Fc polypeptide comprises the sequence of any one of SEQ ID NOS:188, 200, 212, 224, 236, 248, 284, 296, 308, and 320. In some embodiments, the second Fc polypeptide comprises the sequence of SEQ ID NO:391.

[0054] In another aspect, the disclosure features a modified Fc polypeptide dimer, comprising: (a) a first Fc polypeptide that specifically binds TfR comprising a TfR-binding site, amino acid modifications L234A, L235A, and P329G, hole mutations T366S, L368A, and Y407V, and amino acid modification N434S with or without M428L, according to EU numbering scheme, and (b) a second Fc polypeptide that comprises a knob mutation T366W, according to EU numbering scheme, and does not contain a TfR-binding site or any modifications that reduce FcγR binding. In some embodiments, the first Fc polypeptide comprises the sequence of any one of SEQ ID NOS:327, 334, 341, 348, 355, 362, 369, 376, 383, and 390. In some embodiments, the second Fc polypeptide comprises the sequence of SEQ ID NO:391.

[0055] In another aspect, the disclosure features a modified Fc polypeptide dimer, comprising: (a) a first Fc polypeptide that specifically binds TfR comprising a TfR-binding site, amino acid modifications L234A and L235A, and hole mutations T366S, L368A, and Y407V, according to EU numbering scheme, and (b) a second Fc polypeptide that comprises a knob mutation T366W and amino acid modifications M252Y, S254T, and T256E, according to EU numbering scheme, and does not contain a TfR-binding site or any modifications that reduce FcγR binding. In some embodiments, the first Fc polypeptide comprises the sequence of any one of SEQ ID NOS:184, 196, 208, 220, 232, 244, 280, 292, 304, and 316. In some embodiments, the second Fc polypeptide comprises the sequence of SEQ ID NO:394.

[0056] In another aspect, the disclosure features a modified Fc polypeptide dimer, comprising: (a) a first Fc polypeptide that specifically binds TfR comprising a TfR-binding site, amino acid modifications L234A and L235A, and hole mutations T366S, L368A, and Y407V, according to EU numbering scheme, and (b) a second Fc polypeptide that comprises a knob mutation T366W and amino acid modification N434S with or without M428L, according to EU numbering scheme, and does not contain a TfR-binding site or any modifications that reduce FcγR binding. In some embodiments, the first Fc polypeptide comprises the sequence of any one of SEQ ID NOS:184, 196, 208, 220, 232, 244, 280, 292, 304, and 316. In some embodiments, the second Fc polypeptide comprises the sequence of SEQ ID NO:404.

[0057] In another aspect, the disclosure features a modified Fc polypeptide dimer, comprising: (a) a first Fc polypeptide that specifically binds TfR comprising a TfR-binding site, amino acid modifications L234A, L235A, and P329G, and hole mutations T366S, L368A, and Y407V, according to EU numbering scheme, and (b) a second Fc polypeptide that comprises a knob mutation T366W and amino acid modifications M252Y, S254T, and T256E, according to EU numbering scheme, and does not contain a TfR-binding site or any modifications that reduce FcγR binding. In some embodiments, the first Fc polypeptide comprises the sequence of any one of SEQ ID NOS:185, 197, 209, 221, 233, 245, 281, 293, 305, and 317. In some embodiments, the second Fc polypeptide comprises the sequence of SEQ ID NO:394.

[0058] In another aspect, the disclosure features a modified Fc polypeptide dimer, comprising: (a) a first Fc polypeptide that specifically binds TfR comprising a TfR-binding site, amino acid modifications L234A, L235A, and P329G, and hole mutations T366S, L368A, and Y407V, according to EU numbering scheme, and (b) a second Fc polypeptide that comprises a knob mutation T366W and amino acid modification N434S with or without M428L, according to EU numbering scheme, and does not contain a TfR-binding site or any modifications that reduce FcγR binding. In some embodiments, the first Fc polypeptide comprises the sequence of any one of SEQ ID NOS:185, 197, 209, 221, 233, 245, 281, 293, 305, and 317. In some embodiments, the second Fc polypeptide comprises the sequence of SEQ ID NO:404.

[0059] In another aspect, the disclosure features a modified Fc polypeptide dimer, comprising: (a) a first Fc polypeptide that specifically binds TfR comprising a TfR-binding site, amino acid modifications L234A and L235A, hole mutations T366S, L368A, and Y407V, and amino acid modifications M252Y, S254T, and T256E, according to EU numbering scheme, and (b) a second Fc polypeptide that comprises a knob mutation T366W and amino acid modifications M252Y, S254T, and T256E, according to EU numbering scheme, and does not contain a TfR-binding site or any modifications that reduce FcγR binding. In some embodiments, the first Fc polypeptide comprises the sequence of any one of SEQ ID NOS:187, 199, 211, 223, 235, 247, 283, 295, 307, and 319. In some embodiments, the second Fc polypeptide comprises the sequence of SEQ ID NO:394.

[0060] In another aspect, the disclosure features a modified Fc polypeptide dimer, comprising: (a) a first Fc polypeptide that specifically binds TfR comprising a TfR-binding site, amino acid modifications L234A and L235A, hole mutations T366S, L368A, and Y407V, and amino acid modification N434S with or without M428L, according to EU numbering scheme, and (b) a second Fc polypeptide that comprises a knob mutation T366W and amino acid modification N434S with or without M428L, according to EU numbering scheme, and does not contain a TfR-binding site or any modifications that reduce FcγR binding. In some embodiments, the first Fc polypeptide comprises the sequence of any one of SEQ ID NOS:326, 333, 340, 347, 354, 361, 368, 375, 382, and 389. In some embodiments, the second Fc polypeptide comprises the sequence of SEQ ID NO:404.

[0061] In another aspect, the disclosure features a modified Fc polypeptide dimer, comprising: (a) a first Fc polypeptide that specifically binds TfR comprising a TfR-binding site, amino acid modifications L234A, L235A, and P329G, hole mutations T366S, L368A, and Y407V, and amino acid modifications M252Y, S254T, and T256E, according to EU numbering scheme, and (b) a second Fc polypeptide that comprises a knob mutation T366W and amino acid modifications M252Y, S254T, and T256E, according to EU numbering scheme, and does not contain a TfR-binding site or any modifications that reduce FcγR binding. In some embodiments, the first Fc polypeptide comprises the sequence of any one of SEQ ID NOS:188, 200, 212, 224, 236, 248, 284, 296, 308, and 320. In some embodiments, the second Fc polypeptide comprises the sequence of SEQ ID NO:394.

[0062] In another aspect, the disclosure features a modified Fc polypeptide dimer, comprising: (a) a first Fc polypeptide that specifically binds TfR comprising a TfR-binding site, amino acid modifications L234A, L235A, and P329G, hole mutations T366S, L368A, and Y407V, and amino acid modification N434S with or without M428L, according to EU numbering scheme, and (b) a second Fc polypeptide that comprises a knob mutation T366W and amino acid modification N434S with or without M428L, according to EU numbering scheme, and does not contain a TfR-binding site or any modifications that reduce FcγR binding. In some embodiments, the first Fc polypeptide comprises the sequence of any one of SEQ ID NOS:327, 334, 341, 348, 355, 362, 369, 376, 383, and 390. In some embodiments, the second Fc polypeptide comprises the sequence of SEQ ID NO:404.

[0063] In any aspects of the modified Fc polypeptide dimer described herein, the modified Fc polypeptide dimer does not substantially deplete reticulocytes (e.g., circulating reticulocytes). In some embodiments, an amount of reticulocytes depleted after administering the modified Fc polypeptide dimer is less than an amount of reticulocytes depleted after administering a control. In some embodiments, an amount of reticulocytes depleted after administering the modified Fc polypeptide dimer is less than 50%, 45%, 40%, 35%, 30%, 25%, 20%, 15%, 10%, 8%, 5%, 3%, 2%, or 1% of an amount of reticulocytes depleted after administering a control. In some embodiments, an amount of reticulocytes remaining after administering the modified Fc polypeptide dimer is more than an amount of reticulocytes remaining after administering a control. In some embodiments, an amount of reticulocytes remaining after administering the modified Fc polypeptide dimer is at least 1%, 5%, 10%, 15%, 20%, 25%, 30%, 35%, 40%, 45%, or 50% more than an amount of reticulocytes remaining after administering a control.

[0064] In any aspects of the modified Fc polypeptide dimer described herein, the modified Fc polypeptide dimer does not substantially deplete reticulocytes in bone marrow. In some embodiments, an amount of reticulocytes depleted in the bone marrow after administering the modified Fc polypeptide dimer is less than an amount of reticulocytes depleted in the bone marrow after administering a control. In some embodiments, an amount of reticulocytes depleted in the bone marrow after administering the modified Fc polypeptide dimer is less than 50%, 45%, 40%, 35%, 30%, 25%, 20%, 15%, 10%, 8%, 5%, 3%, 2%, or 1% of an amount of reticulocytes depleted in the bone marrow after administering a control. In some embodiments, an amount of reticulocytes remaining in the bone marrow after administering the modified Fc polypeptide dimer is more than an amount of reticulocytes remaining in the bone marrow after administering a control. In some embodiments, an amount of reticulocytes remaining in the bone marrow after administering the modified Fc polypeptide dimer is at least 1%, 5%, 10%, 15%, 20%, 25%, 30%, 35%, 40%, 45%, or 50% more than an amount of reticulocytes remaining in the bone marrow after administering a control.

[0065] In some embodiments, the control is a corresponding TfR-binding Fc dimer (i.e., having the same mutations that result in TfR binding as the modified Fc polypeptide dimer described above) with full effector function and/or contains no mutations that reduce FcγR binding.

[0066] In another aspect, the disclosure features an Fc polypeptide dimer-Fab fusion protein that is capable of being actively transported across the BBB, the Fc polypeptide dimer-Fab fusion protein comprising: (a) an antibody variable region that is capable of binding an antigen, or antigen-binding fragment thereof; and (b) a modified Fc polypeptide dimer comprising (i) a first Fc polypeptide that specifically binds TfR comprising a TfR-binding site and one or more amino acid modifications that reduce FcγR binding, for example, when bound to TfR (e.g., but has limited or no reduction of FcγR binding when not bound to TfR), and (ii) a second Fc polypeptide that does not contain a TfR-binding site or any modifications that reduce FcγR binding.

[0067] In some embodiments of this aspect, the amino acid modifications that reduce FcγR binding, e.g., when bound to TfR, comprise Ala at position 234 and at position 235, according to EU numbering scheme. In particular embodiments, the amino acid modifications that reduce FcγR binding, e.g., when bound to TfR, further comprise Gly at position 329, according to EU numbering scheme.

[0068] In some embodiments of this aspect, the first Fc polypeptide and/or the second Fc polypeptide comprises amino acid modifications that increase serum stability (e.g., serum half-life). In some embodiments, the amino acid modifications that increase serum stability (e.g., serum half-life) comprise Tyr at position 252, Thr at position 254, and Glu at position 256, according to EU numbering scheme. In some embodiments, the amino acid modifications that increase serum stability (e.g., serum half-life) comprise (i) a Leu at position 428 and a Ser at position 434, or (ii) a Ser or Ala at position 434, according to EU numbering scheme.

[0069] In some embodiments of this aspect, the antibody variable region sequence comprises a Fab domain. In some embodiments, the antibody variable region sequence comprises two antibody variable region heavy chains and two antibody variable region light chains, or respective fragments thereof.

[0070] In some embodiments, the Fc polypeptide or Fc polypeptide dimer is fucose deficient or afucosylated (e.g., as described herein).

[0071] In another aspect, the disclosure features a pharmaceutical composition comprising a modified Fc polypeptide dimer described herein and a pharmaceutically acceptable carrier.

[0072] In another aspect, the disclosure features a pharmaceutical composition comprising the Fc polypeptide dimer-Fab fusion protein described herein and a pharmaceutically acceptable carrier.

[0073] In another aspect, the disclosure features a method of transcytosis of a composition across an endothelium, comprising contacting the endothelium with a composition comprising a modified Fc polypeptide dimer described herein. In some embodiments, the endothelium is the BBB.

[0074] In another aspect, the disclosure features a method of transcytosis of a composition across an endothelium, comprising contacting the endothelium with a composition comprising an Fc polypeptide dimer-Fab fusion protein described herein. In some embodiments, the endothelium is the BBB.

### BRIEF DESCRIPTION OF THE DRAWINGS

[0075] FIGS. 1A and 1B are graphs showing that the TfR-binding Fc polypeptide dimer fused to an anti-BACE1 Fab, in which the TfR-binding Fc polypeptide dimer was modified to reduce FcγR binding with L234A and L235A (LALA) mutations (numbered with reference to EU numbering scheme) on both Fc polypeptides of the dimer, did not deplete reticulocytes either in blood (FIG. 1A) or bone marrow (FIG. 1B) in human TfR knock-in (TfR^{ms/hu} KI) mice.

[0076] FIGS. 2A-2D are graphs showing that the modified Fc polypeptide dimer fused to an anti-BACE1 Fab, in which the TfR-binding Fc polypeptide dimer has the LALA mutations in the cis configuration relative to the TfR-binding site (“cis-LALA”), did not deplete reticulocytes in blood (FIG. 2A: at 25 mg/kg; FIG. 2C: at 50 mg/kg) or bone marrow (FIG. 2B: at 25 mg/kg; FIG. 2D: at 50 mg/kg) in human TfR knock-in (TfR^{ms/hu} KI) mice, whereas the analogously modified Fc polypeptide dimer fused to an anti-BACE1 Fab, in which the Fc polypeptide dimer has the LALA mutations trans to the TfR-binding site, depleted reticulocytes in both blood and bone marrow.

[0077] FIGS. 3A and 3B are graphs showing that the cis-LALA modified Fc polypeptide dimer (FIG. 3A: CH3C.35.21; FIG. 3B: CH3C.35.23) fused to an anti-BACE1 Fab and a modified Fc polypeptide with LALA mutations on both Fc polypeptides fused to an anti-BACE1 Fab did not induce TfR-mediated ADCC, whereas the hIgG1 with the TfR-binding site but without LALA mutations induced ADCC on Ramos cells expressing endogenous TfR.

[0078] FIG. 4 is a graph showing that TfR-binding Fc polypeptide dimer (CH3C.35.21) had no effect on TfR-mediated complement dependent cytotoxicity (CDC) activity, while anti-TfR control antibody Ab204 induced CDC in CHO-hTfR cells.

[0079] FIG. 5 is a graph showing that the cis-LALA modified Fc polypeptide dimer fused to an anti-BACE1 Fab induced pSyk protein levels in primary human microglial cells, similar to that seen in the TfR-binding polypeptide with wild-type hIgG1, whereas the modified Fc polypeptide dimer with LALA mutations on both Fc polypeptides fused to an anti-BACE1 Fab did not induce pSyk.

[0080] FIGS. 6A and 6B are graphs showing that hIgG1 with a cis-LALA Fc polypeptide dimer and mCD20 Fab binding site elicited ADCC similar to that of the anti-mCD20 antibody and hIgG1 with a TfR-binding site and mCD20 Fab binding site (FIG. 6A). Similarly, hIgG1 with a cis-LALA Fc polypeptide dimer and hCD20 Fab binding site elicited Fab-mediated CDC to the same degree as anti-hCD20 and hIgG1 with a TfR-binding site and hCD20 Fab binding site (FIG. 6B).

[0081] FIGS. 7A and 7B are graphs showing that hIgG1 with a cis-LALA Fc polypeptide dimer and mCD20 Fab binding site elicited robust B cell depletion similar to the anti-mCD20 antibody and hIgG1 with a TfR-binding site and mCD20 Fab binding site (FIGS. 7A and 7B). These results demonstrate that the cis-LALA modified Fc polypeptide dimer retains its Fc function and has Fab-mediated effector function in vivo.

[0082] FIGS. 8A, 8B, and 8C are graphs showing that mice treated with anti-Aβ having a TfR-binding site (CH3C.35.23.4) with cis-LALA Fc polypeptide dimer elicited robust microglial recruitment towards Aβ plaques (FIG. 8A: % plaque area with microglial overlap;

[0083] FIG. 8B: the same data normalized to the control IgG) and reduced plaques sized at 30-125 μm² (FIG. 8C). These results suggest that anti-Aβ having a cis-LALA Fc polypeptide dimer retains robust effector function for microglial recruitment and the ability to reduce some Aβ plaques similar to anti-Aβ.

### DETAILED DESCRIPTION

### I. Introduction

[0084] Modified Fc polypeptide dimers that include a TfR-binding site are capable of crossing the BBB, as well as transporting therapeutics across the BBB. As described herein, these Fc polypeptide dimers, if not engineered to reduce effector function, can also deplete reticulocytes in vivo since reticulocytes also express TfR. Reticulocyte depletion can be avoided by introducing modifications that remove effector function in the Fc polypeptides of the Fc polypeptide dimer, i.e., modifications that remove or reduce Fey receptor (FcγR) binding (e.g., L234A and L235A (LALA) substitutions, numbered with reference to EU numbering scheme). This approach, however, is disadvantageous in cases where effector function is desired when the Fab portion of the molecule is bound to its target (e.g., a therapeutic target protein).

[0085] The present disclosure provides modified Fc polypeptide dimers that retain effector function but do not cause substantial depletion of reticulocytes. These modified Fc polypeptide dimers are also referred to as “effector function-positive, TfR-binding Fc polypeptide dimers” herein. In some embodiments, only one of the two Fc polypeptides (but not both Fc polypeptides) of the effector function-positive, TfR-binding Fc polypeptide dimer is modified to both reduce effector function and bind TfR. The other Fc polypeptide of the modified Fc polypeptide dimer does not contain a TfR-binding site or any modifications that reduce effector function, but it may contain mutations that enhance effector function. Effector function-positive, TfR-binding Fc polypeptide dimers that have only one of the two Fc polypeptides containing both the TfR-binding site and modifications that reduce FcγR binding when bound to TfR, while the other Fc polypeptide does not contain a TfR-binding site or any modifications that reduce FcγR binding, are referred to as having the cis configuration. As described herein, these modified Fc polypeptide dimers having the cis configuration were tested for their effect on reticulocytes. These experiments demonstrated that by introducing both the TfR-binding site and mutations that reduce FcγR binding when bound to TfR to only one of the two polypeptides forming the modified Fc polypeptide dimer, it was possible to reduce effector function upon TfR binding, leading to TfR binding without substantial depletion of reticulocytes.

[0086] As described in detail herein, modified Fc polypeptide dimers having different configurations were fused to Fabs directed against a therapeutic target (e.g., CD20) to determine whether effector function (e.g., ADCC and CDC) could be retained when the Fab bound its target but not TfR. As described in detail below, particular configurations of (a) modifications that reduce FcγR binding, for example, when bound to TfR and (b) modifications that result in TfR binding in the modified Fc polypeptide dimer can produce, when the Fc polypeptide dimer is fused to a Fab, Fc polypeptide dimer-Fab fusions that still retain effector function (e.g., ADCC or CDC), but do not deplete reticulocytes. This approach allows the use of TfR-mediated transport across the BBB while retaining effector function.

[0087] Thus, the present disclosure relates, in part, to modified Fc polypeptide dimers that have been engineered to bind TfR, have reduced effector function (e.g., ADCC or CDC) when bound to TfR, but still retain effector function (e.g., ADCC or CDC) when the Fc polypeptide dimer is fused to a therapeutic Fab and bound to the Fab's target antigen.

### II. Definitions

[0088] As used herein, the singular forms “a,” “an,” and “the” include plural referents unless the content clearly dictates otherwise. Thus, for example, reference to “a polypeptide” may include two or more such molecules, and the like.

[0089] As used herein, the terms “about” and “approximately,” when used to modify an amount specified in a numeric value or range, indicate that the numeric value as well as reasonable deviations from the value known to the skilled person in the art, for example ±20%, ±10%, or ±5%, are within the intended meaning of the recited value.

[0090] As used herein, the term “Fc polypeptide” refers to the C-terminal region of a naturally occurring immunoglobulin heavy chain polypeptide that is characterized by an Ig fold as a structural domain. An Fc polypeptide contains constant region sequences including at least the CH2 domain and/or the CH3 domain and may contain at least part of the hinge region. In general, an Fc polypeptide does not contain a variable region.

[0091] A “modified Fc polypeptide” refers to an Fc polypeptide that has at least one mutation, e.g., a substitution, deletion or insertion, as compared to a wild-type immunoglobulin heavy chain Fc polypeptide sequence, but retains the overall Ig fold or structure of the native Fc polypeptide.

[0092] As used herein, the term “Fe polypeptide dimer” refers to a dimer of two Fc polypeptides. In some embodiments, an Fc polypeptide dimer is capable of binding an Fc receptor (e.g., FcγR). In an Fc polypeptide dimer, the two Fc polypeptides dimerize by the interaction between the two CH3 antibody constant domains. In some embodiments, the two Fc polypeptides may also dimerize via one or more disulfide bonds that form between the hinge domains of the two dimerizing Fc domain monomers. An Fc polypeptide dimer may be a wild-type Fc polypeptide dimer or a modified Fc polypeptide dimer. A wild-type Fc polypeptide dimer is formed by the dimerization of two wild-type Fc polypeptides. An Fc polypeptide dimer can be a heterodimer or a homodimer.

[0093] As used herein, the term “modified Fc polypeptide dimer” refers to an Fc polypeptide dimer that contains at least one modified Fc polypeptide. In some embodiments, a modified Fc polypeptide dimer contains two modified Fc polypeptides. A modified Fc polypeptide dimer may be a homodimer (i.e., contains two identical modified Fc polypeptides) or a heterodimer (i.e., contains two different Fc polypeptides in which at least one of the two Fc polypeptides is a modified Fc polypeptide).

[0094] A “transferrin receptor” or “TfR” as used herein refers to transferrin receptor protein 1. The human transferrin receptor 1 polypeptide sequence is set forth in SEQ ID NO:63. Transferrin receptor protein 1 sequences from other species are also known (e.g., chimpanzee, accession number XP_003310238.1; rhesus monkey, NP 001244232.1; dog, NP_001003111.1; cattle, NP_001193506.1; mouse, NP_035768.1; rat, NP_073203.1; and chicken, NP_990587.1). The term “transferrin receptor” also encompasses allelic variants of exemplary reference sequences, e.g., human sequences, that are encoded by a gene at a transferrin receptor protein 1 chromosomal locus. Full-length TfR protein includes a short N-terminal intracellular region, a transmembrane region, and a large extracellular domain. The extracellular domain is characterized by three domains: a protease-like domain, a helical domain, and an apical domain. The apical domain sequence of human transferrin receptor 1 is set forth in SEQ ID NO:31.

[0095] As used herein, the term “Fcγ receptor” or “FcγR” refers to one type of Fc receptors, which are classified based on the type of antibody that they recognized. FcγRs includes several members, FcγRT (CD64), FcγRIIA (CD32), FcγRIM (CD32), FcγRIIIA (CD16a), and FcγRIIIB (CD16b), which differ in their antibody affinities due to different molecular structures. FcγRs bind to the Fc portion of IgG class of antibodies and are crucial for inducing phagocytosis of opsonized microbes. FcγRs are found on the cell surface of cells in the immune system. FcγRs are responsible for eliciting immune system effector functions and are activated upon binding of the Fc portion of an antibody to the receptor. FcγRs mediate immune functions, e.g., binding to antibodies that are attached to infected cells or invading pathogens, stimulating phagocytic or cytotoxic cells to destroy microbes or infected cells by antibody-mediated phagocytosis or ADCC.

[0096] As used herein, the term “reduce FcγR binding” refers to a modified Fc polypeptide or a modified Fc polypeptide dimer that contains mutations in the CH3 domain of the modified Fc polypeptide, in which the mutations decrease the affinity of the modified Fc polypeptide to the FcγR by 0.01% to 90% (e.g., 0.1%, 0.5%, 1%, 5%, 10%, 15%, 20%, 25%, 30%, 35%, 40%, 45%, 50%, 55%, 60%, 65%, 70%, 75%, 80%, 85%, or 90%) compared the affinity of an Fc polypeptide that does not contain mutations to reduce FcγR binding (e.g., a wild-type Fc polypeptide dimer). FcγR binding may be measured using, e.g., Surface Plasmon Resonance (SPR) methods (e.g., a Biacore™ system). Alternatively, FcγR binding can be measured using a functional assay, for example, an ADCC assay such as one described herein (e.g., an in vivo or in vitro assay of cell killing). The reduction of FcγR binding may be measured when the modified Fc polypeptide or modified Fc polypeptide dimer is bound to TfR. In some embodiments, the modified Fc polypeptide or modified Fc polypeptide dimer may have reduced FcγR binding when bound to TfR, but limited (e.g., less than 25%, 20%, 15%, 10%, 8%, 5%, 3%, 2%, or 1% reduction) or no reduction when not bound to TfR.

[0097] As described further herein, a modified Fc polypeptide dimer may contain a first Fc polypeptide that has both a TfR-binding site and mutations that reduce FcγR binding when bound to TfR and a second Fc polypeptide that has neither a TfR-binding site nor mutations that reduce FcγR binding. Thus, upon TfR engagement, the resulting asymmetrical Fc polypeptide dimer having the first and second Fc polypeptides may have an overall reduced affinity for FcγR. By contrast, there may be limited (e.g., as described above) or no reduction in FcγR binding when not bound to TfR.

[0098] The term “FcRn” refers to the neonatal Fc receptor. Binding of Fc polypeptides to FcRn reduces clearance and increases serum half-life of the Fc polypeptide. The human FcRn protein is a heterodimer that is composed of a protein of about 50 kDa in size that is similar to a major histocompatibility (MHC) class I protein and a 02-microglobulin of about 15 kDa in size.

[0099] As used herein, an “FcRn binding site” refers to the region of an Fc polypeptide that binds to FcRn. In human IgG, the FcRn binding site, as numbered using the EU numbering scheme, includes L251, M252, 1253, 5254, R255, T256, M428, H433, N434, H435, and Y436. These positions correspond to positions 21 to 26, 198, and 203 to 206 of SEQ ID NO:1.

[0100] As used herein, a “native FcRn binding site” refers to a region of an Fc polypeptide that binds to FcRn and that has the same amino acid sequence as the region of a naturally occurring Fc polypeptide that binds to FcRn.

[0101] As used herein, the term “does not substantially deplete reticulocytes in vivo” means that the reduction in reticuloctyes (e.g., the reduction in bone marrow reticulocytes or circulating reticuloctyes) caused by an effector function-positive, TfR-binding Fc polypeptide dimer described herein, or an Fc polypeptide dimer-Fab fusion protein described herein that contains an effector function-positive, TfR-binding Fc polypeptide dimer, is less than (e.g., less than 80%, 75%, 70%, 65%, 60%, 55%, 50%, 45%, 40%, 35%, 30%, 25%, 20%, 15%, 10%, 8%, 5%, 3%, 2%, or 1% of) the reduction in reticulocytes (e.g., the reduction in bone marrow reticulocytes or circulating reticuloctyes) caused by a control, e.g., a corresponding TfR-binding Fc dimer with full effector function and/or contains no mutations that reduce FcγR binding, or an antibody containing a corresponding TfR-binding Fc dimer with full effector function and/or contains no mutations that reduce FcγR binding.

[0102] The term “does not substantially deplete reticulocytes in vivo” can also mean that the amount or percentage of the remaining reticuloctyes (e.g., the remaining reticuloctyes in the bone marrow or in circulation) after dosing an effector function-positive, TfR-binding Fc polypeptide dimer described herein, or an Fc polypeptide dimer-Fab fusion protein described herein that contains an effector function-positive, TfR-binding Fc polypeptide dimer, is more than (e.g., at least 1%, 5%, 10%, 15%, 20%, 25%, 30%, 35%, 40%, 45%, or 50% more than) the amount or percentage of the remaining reticulocytes (e.g., the remaining reticuloctyes in the bone marrow or in circulation) after dosing a control (e.g., a corresponding TfR-binding Fc dimer with full effector function and/or contains no mutations that reduce FcγR binding, or an antibody containing a corresponding TfR-binding Fc dimer with full effector function and/or contains no mutations that reduce FcγR binding).

[0103] The amount or percentage of reticulocyte depletion (e.g., reticulocyte depletion in the bone marrow or in circulation), or the amount or percentage of remaining reticulocytes (e.g., remaining reticulocytes in the bone marrow or in circulation), may be measured in human TfR knock-in (TfR^{ms/hu} KI) mice (e.g., human TfR apical domain knock-in mice (“hTfR_{apical} knock-in mice”)), which are engineered to replace the mouse TfR with human apical domain/mouse chimeric TfR protein or in a non-human primate, such as a cynomolgus monkey. The measurement may be made by dosing the modified Fc dimer or control, e.g., 25 to 50 mg/kg intravenously (e.g., to the TfR^{ms/hu} KI mice) and circulating reticulocytes may be measured at 24 h post-dose by cytochemical reactions using the Advia 120 Hematology System, as described herein. Bone marrow reticulocytes can be measured using FACS sorting to determine the population of Ter119⁺, hCD71^{hi}, and FSC^{low} population, as described herein.

[0104] The terms “CH3 domain” and “CH2 domain” as used herein refer to immunoglobulin constant region domain polypeptides. In the context of IgG antibodies, a CH3 domain polypeptide refers to the segment of amino acids from about position 341 to about position 447 as numbered according to the EU numbering scheme, and a CH2 domain polypeptide refers to the segment of amino acids from about position 231 to about position 340 as numbered according to the EU numbering scheme. CH2 and CH3 domain polypeptides may also be numbered by the IMGT (ImMunoGeneTics) numbering scheme in which the CH2 domain numbering is 1-110 and the CH3 domain numbering is 1-107, according to the IMGT Scientific chart numbering (IMGT website). CH2 and CH3 domains are part of the Fc region of an immunoglobulin. In the context of IgG antibodies, an Fc region refers to the segment of amino acids from about position 231 to about position 447 as numbered according to the EU numbering scheme. As used herein, the term “Fc region” may also include at least a part of a hinge region of an antibody. An illustrative hinge region sequence is set forth in SEQ ID NO:62.

[0105] The term “variable region” refers to a domain in an antibody heavy chain or light chain that derived from a germline Variable (V) gene, Diversity (D) gene, or Joining (J) gene (and not derived from a Constant (Cμ and Cδ gene segment), and that gives an antibody its specificity for binding to an antigen. Typically, an antibody variable region comprises four conserved “framework” regions interspersed with three hypervariable “complementarity determining regions.”

[0106] The terms “wild-type,” “native,” and “naturally occurring” with respect to a CH3 or CH2 domain are used herein to refer to a domain that has a sequence that occurs in nature.

[0107] As used herein, the term “mutant” with respect to a mutant polypeptide or mutant polynucleotide is used interchangeably with “variant.” A variant with respect to a given wild-type CH3 or CH2 domain reference sequence can include naturally occurring allelic variants. A “non-naturally” occurring CH3 or CH2 domain refers to a variant or mutant domain that is not present in a cell in nature and that is produced by genetic modification, e.g., using genetic engineering technology or mutagenesis techniques, of a native CH3 domain or CH2 domain polynucleotide or polypeptide. A “variant” includes any domain comprising at least one amino acid mutation with respect to wild-type. Mutations may include substitutions, insertions, and deletions.

[0108] The term “amino acid” refers to naturally occurring and synthetic amino acids, as well as amino acid analogs and amino acid mimetics that function in a manner similar to the naturally occurring amino acids.

[0109] Naturally occurring amino acids are those encoded by the genetic code, as well as those amino acids that are later modified, e.g., hydroxyproline, γ-carboxyglutamate and O-phosphoserine. “Amino acid analogs” refers to compounds that have the same basic chemical structure as a naturally occurring amino acid, i.e., an α carbon that is bound to a hydrogen, a carboxyl group, an amino group, and an R group, e.g., homoserine, norleucine, methionine sulfoxide, methionine methyl sulfonium. Such analogs have modified R groups (e.g., norleucine) or modified peptide backbones, but retain the same basic chemical structure as a naturally occurring amino acid. “Amino acid mimetics” refers to chemical compounds that have a structure that is different from the general chemical structure of an amino acid, but that function in a manner similar to a naturally occurring amino acid.

[0110] Naturally occurring α-amino acids include, without limitation, alanine (Ala), cysteine (Cys), aspartic acid (Asp), glutamic acid (Glu), phenylalanine (Phe), glycine (Gly), histidine (His), isoleucine (Ile), arginine (Arg), lysine (Lys), leucine (Leu), methionine (Met), asparagine (Asn), proline (Pro), glutamine (Gln), serine (Ser), threonine (Thr), valine (Val), tryptophan (Trp), tyrosine (Tyr), and combinations thereof. Stereoisomers of a naturally occurring α-amino acids include, without limitation, D-alanine (D-Ala), D-cysteine (D-Cys), D-aspartic acid (D-Asp), D-glutamic acid (D-Glu), D-phenylalanine (D-Phe), D-histidine (D-His), D-isoleucine (D-Ile), D-arginine (D-Arg), D-lysine (D-Lys), D-leucine (D-Leu), D-methionine (D-Met), D-asparagine (D-Asn), D-proline (D-Pro), D-glutamine (D-Gln), D-serine (D-Ser), D-threonine (D-Thr), D-valine (D-Val), D-tryptophan (D-Trp), D-tyrosine (D-Tyr), and combinations thereof.

[0111] Amino acids may be referred to herein by either their commonly known three letter symbols or by the one-letter symbols recommended by the IUPAC-IUB Biochemical Nomenclature Commission.

[0112] The terms “polypeptide” and “peptide” are used interchangeably herein to refer to a polymer of amino acid residues in a single chain. The terms apply to amino acid polymers in which one or more amino acid residue is an artificial chemical mimetic of a corresponding naturally occurring amino acid, as well as to naturally occurring amino acid polymers and non-naturally occurring amino acid polymers. Amino acid polymers may comprise entirely L-amino acids, entirely D-amino acids, or a mixture of L and D amino acids.

[0113] The term “protein” as used herein refers to either a polypeptide or a dimer (i.e, two) or multimer (i.e., three or more) of single chain polypeptides. The single chain polypeptides of a protein may be joined by a covalent bond, e.g., a disulfide bond, or non-covalent interactions.

[0114] The term “conservative substitution,” “conservative mutation,” or “conservatively modified variant” refers to an alteration that results in the substitution of an amino acid with another amino acid that can be categorized as having a similar feature. Examples of categories of conservative amino acid groups defined in this manner can include: a “charged/polar group” including Glu (Glutamic acid or E), Asp (Aspartic acid or D), Asn (Asparagine or N), Gln (Glutamine or Q), Lys (Lysine or K), Arg (Arginine or R), and His (Histidine or H); an “aromatic group” including Phe (Phenylalanine or F), Tyr (Tyrosine or Y), Trp (Tryptophan or W), and (Histidine or H); and an “aliphatic group” including Gly (Glycine or G), Ala (Alanine or A), Val (Valine or V), Leu (Leucine or L), Ile (Isoleucine or I), Met (Methionine or M), Ser (Serine or S), Thr (Threonine or T), and Cys (Cysteine or C). Within each group, subgroups can also be identified. For example, the group of charged or polar amino acids can be sub-divided into sub-groups including: a “positively-charged sub-group” comprising Lys, Arg and His; a “negatively-charged sub-group” comprising Glu and Asp; and a “polar sub-group” comprising Asn and Gln. In another example, the aromatic or cyclic group can be sub-divided into sub-groups including: a “nitrogen ring sub-group” comprising Pro, His and Trp; and a “phenyl sub-group” comprising Phe and Tyr. In another further example, the aliphatic group can be sub-divided into sub-groups, e.g., an “aliphatic non-polar sub-group” comprising Val, Leu, Gly, and Ala; and an “aliphatic slightly-polar sub-group” comprising Met, Ser, Thr, and Cys. Examples of categories of conservative mutations include amino acid substitutions of amino acids within the sub-groups above, such as, but not limited to: Lys for Arg or vice versa, such that a positive charge can be maintained; Glu for Asp or vice versa, such that a negative charge can be maintained; Ser for Thr or vice versa, such that a free —OH can be maintained; and Gln for Asn or vice versa, such that a free —NH₂ can be maintained. In some embodiments, hydrophobic amino acids are substituted for naturally occurring hydrophobic amino acid, e.g., in the active site, to preserve hydrophobicity.

[0115] The terms “identical” or percent “identity,” in the context of two or more polypeptide sequences, refer to two or more sequences or subsequences that are the same or have a specified percentage of amino acid residues, e.g., at least 60% identity, at least 65%, at least 70%, at least 75%, at least 80%, at least 85%, at least 90%, or at least 95% or greater, that are identical over a specified region when compared and aligned for maximum correspondence over a comparison window, or designated region as measured using one a sequence comparison algorithm or by manual alignment and visual inspection.

[0116] For sequence comparison of polypeptides, typically one amino acid sequence acts as a reference sequence, to which a candidate sequence is compared. Alignment can be performed using various methods available to one of skill in the art, e.g., visual alignment or using publicly available software using known algorithms to achieve maximal alignment. Such programs include the BLAST programs, ALIGN, ALIGN-2 (Genentech, South San Francisco, Calif.) or Megalign (DNASTAR). The parameters employed for an alignment to achieve maximal alignment can be determined by one of skill in the art. For sequence comparison of polypeptide sequences for purposes of this application, the BLASTP algorithm standard protein BLAST for aligning two proteins sequence with the default parameters is used.

[0117] The terms “corresponding to,” “determined with reference to,” or “numbered with reference to” when used in the context of the identification of a given amino acid residue in a polypeptide sequence, refers to the position of the residue of a specified reference sequence when the given amino acid sequence is maximally aligned and compared to the reference sequence. Thus, for example, an amino acid residue in a polypeptide “corresponds to” an amino acid in the region of SEQ ID NO:1, when the residue aligns with the amino acid in SEQ ID NO:1 when optimally aligned to SEQ ID NO:1. The polypeptide that is aligned to the reference sequence need not be the same length as the reference sequence.

[0118] As used herein, the term “specifically binds” or “selectively binds” to a target, e.g., TfR or FcγR, when referring to a polypeptide comprising a modified CH3 domain as described herein, refers to a binding reaction whereby the polypeptide binds to the target with greater affinity, greater avidity, and/or greater duration than it binds to a structurally different target. In typical embodiments, the polypeptide has at least 5-fold, 6-fold, 7-fold, 8-fold, 9-fold, 10-fold, 20-fold, 25-fold, 50-fold, 100-fold, 1,000-fold, 10,000-fold, or greater affinity for a specific target, e.g., TfR or FcγR, compared to an unrelated target when assayed under the same affinity assay conditions. The term “specific binding,” “specifically binds to,” or “is specific for” a particular target (e.g., e.g., TfR or FcγR), as used herein, can be exhibited, for example, by a molecule having an equilibrium dissociation constant K_{D} for the target to which it binds of, e.g., 10⁻⁴ M or smaller, e.g., 10⁻⁵M, 10−6 M, 10−7 M, 10⁻⁸ M, 10⁻⁹ M, 10⁻¹⁰ M, 10⁻¹¹ M, or 10⁻¹² M. In some embodiments, a modified CH3 domain polypeptide specifically binds to an epitope on a TfR that is conserved among species (e.g., structurally conserved among species), e.g., conserved between non-human primate and human species (e.g., structurally conserved between non-human primate and human species). In some embodiments, a polypeptide may bind exclusively to a human TfR.

[0119] The term “binding affinity” as used herein refers to the strength of the non-covalent interaction between two molecules, e.g., a single binding site on a polypeptide and a target, e.g., TfR, to which it binds. Thus, for example, the term may refer to 1:1 interactions between a polypeptide and its target, unless otherwise indicated or clear from context. Binding affinity may be quantified by measuring an equilibrium dissociation constant (K_{D}), which refers to the dissociation rate constant (k_{d}, time⁻¹) divided by the association rate constant (kₐ, time⁻¹ M⁻¹). K_{D} can be determined by measurement of the kinetics of complex formation and dissociation, e.g., using Surface Plasmon Resonance (SPR) methods, e.g., a Biacore™ system; kinetic exclusion assays such as KinExA®; and BioLayer interferometry (e.g., using the ForteBio® Octet® platform). As used herein, “binding affinity” includes not only formal binding affinities, such as those reflecting 1:1 interactions between a polypeptide and its target, but also apparent affinities for which K_{D}'s are calculated that may reflect avid binding.

### III. TfR-Binding Fc Polypeptides

[0120] This section describes generation of modified Fc polypeptides that bind to TfR and are capable of being transported across the blood-brain barrier (BBB).

### CH3 TfR-Binding Polypeptides

[0121] In some embodiments, the modified Fc polypeptide contains a modified human Ig CH3 domain, such as an IgG CH3 domain. The CH3 domain can be of any IgG subtype, i.e., from IgG1, IgG2, IgG3, or IgG4. In the context of IgG antibodies, a CH3 domain refers to the segment of amino acids from about position 341 to about position 447 as numbered according to the EU numbering scheme. The positions in the CH3 domain for purposes of identifying the corresponding set of amino acid positions for TfR binding are determined with reference to EU numbering scheme, SEQ ID NO:3, or amino acids 111-217 of SEQ ID NO:1 unless otherwise specified. Substitutions are also determined with reference to EU numbering scheme or SEQ ID NO:1, i.e., an amino acid is considered to be a substitution relative to the amino acid at the corresponding position in EU numbering scheme or SEQ ID NO:1.

[0122] As indicated above, sets of residues of a CH3 domain that can be modified are numbered herein with reference to EU numbering scheme or SEQ ID NO:1. Any CH3 domain, e.g., an IgG1, IgG2, IgG3, or IgG4 CH3 domain, may have modifications, e.g., amino acid substitutions, in one or more sets of residues that correspond to residues at the noted positions in EU numbering scheme or SEQ ID NO:1. The positions of each of the IgG1, IgG2, IgG3, and IgG4 sequences that correspond to any given position of EU numbering scheme or SEQ ID NO:1 can be readily determined.

[0123] One of skill understands that CH3 domains of other immunoglobulin isotypes, e.g., IgM, IgA, IgE, IgD, etc. may be similarly modified by identifying the amino acids in those domains that correspond to the amino acid positions described herein. Modifications may also be made to corresponding domains from immunoglobulins from other species, e.g., non-human primates, monkey, mouse, rat, rabbit, dog, pig, chicken, and the like.

[0124] In one embodiment, a modified CH3 domain polypeptide that specifically binds TfR binds to the apical domain of the TfR at an epitope that comprises position 208 of the full length human TfR sequence (SEQ ID NO:63), which corresponds to position 11 of the human TfR apical domain sequence set forth in SEQ ID NO:31. SEQ ID NO:31 corresponds to amino acids 198-378 of the human TfR-1 uniprotein sequence P02786 (SEQ ID NO:63). In some embodiments, the modified CH3 domain polypeptide binds to the apical domain of the TfR at an epitope that comprises positions 158, 188, 199, 207, 208, 209, 210, 211, 212, 213, 214, 215, and/or 294 of the full length human TfR sequence (SEQ ID NO:63). The modified CH3 domain polypeptide may bind to the TfR without blocking or otherwise inhibiting binding of transferrin to the receptor. In some embodiments, binding of transferrin to TfR is not substantially inhibited. In some embodiments, binding of transferrin to TfR is inhibited by less than about 50% (e.g., less than about 45%, 40%, 35%, 30%, 25%, 20%, 15%, 10%, or 5%). In some embodiments, binding of transferrin to TfR is inhibited by less than about 20% (e.g., less than about 19%, 18%, 17%, 16%, 15%, 14%, 13%, 12%, 11%, 10%, 9%, 8%, 7%, 6%, 5%, 4%, 3%, 2%, or 1%). Illustrative CH3 domain polypeptides that exhibit this binding specificity include polypeptides having amino acid substitutions at positions 380, 384, 386, 387, 388, 389, 390, 413, 415, 416, and 421, according to the EU numbering scheme.

[0125] CH3 TfR Binding Set: 384, 386, 387, 388, 389, 390, 413, 416, and 421

[0126] In some embodiments, a modified CH3 domain polypeptide comprises one, two, three, four, five, six, seven, eight, nine, ten, or eleven substitutions in a set of amino acid positions comprising 380, 384, 386, 387, 388, 389, 390, 413, 415, 416, and 421, according to the EU numbering scheme (set CH3C). Illustrative substitutions that may be introduced at these positions are shown in Table 3. Additional substitutions are shown in Table 4. In some embodiments, the amino acid at position 388 and/or 421 is an aromatic amino acid, e.g., Trp, Phe, or Tyr. In some embodiments, the amino acid at position 388 is Trp. In some embodiments, the amino acid at position 388 is Gly. In some embodiments, the aromatic amino acid at position 421 is Trp or Phe.

[0127] In certain embodiments, the modified CH3 domain polypeptide comprises one, two, three, four, five, six, seven, eight, nine, ten, or eleven positions selected from the following: Glu, Leu, Ser, Val, Trp, Tyr, or Gln at position 380; Leu, Tyr, Phe, Trp, Met, Pro, or Val at position 384; Leu, Thr, His, Pro, Asn, Val, or Phe at position 386; Val, Pro, Ile, or an acidic amino acid at position 387; Trp at position 388; an aliphatic amino acid, Gly, Ser, Thr, or Asn at position 389; Gly, His, Gln, Leu, Lys, Val, Phe, Ser, Ala, Asp, Glu, Asn, Arg, or Thr at position 390; an acidic amino acid, Ala, Ser, Leu, Thr, Pro, Ile, or His at position 413; Glu, Ser, Asp, Gly, Thr, Pro, Gln, or Arg at position 415; Thr, Arg, Asn, or an acidic amino acid at position 416; and/or an aromatic amino acid, His, or Lys at position 421.

[0128] In some embodiments, a modified CH3 domain polypeptide that specifically binds to TfR comprises at least one position having a substitution, according to EU numbering scheme, as follows: Leu, Tyr, Met, or Val at position 384; Leu, Thr, His, or Pro at position 386; Val, Pro, or an acidic amino acid at position 387; an aromatic amino acid, e.g., Trp or Gly (e.g., Trp) at position 388; Val, Ser, or Ala at position 389; an acidic amino acid, Ala, Ser, Leu, Thr, or Pro at position 413; Thr or an acidic amino acid at position 416; or Trp, Tyr, His, or Phe at position 421. In some embodiments, a modified CH3 domain polypeptide may comprise a conservative substitution, e.g., an amino acid in the same charge grouping, hydrophobicity grouping, side chain ring structure grouping (e.g., aromatic amino acids), or size grouping, and/or polar or non-polar grouping, of a specified amino acid at one or more of the positions in the set. Thus, for example, Ile may be present at position 384, 386, and/or position 413. In some embodiments, the acidic amino acid at position one, two, or each of positions 387, 413, and 416 is Glu. In other embodiments, the acidic amino acid at one, two or each of positions 387, 413, and 416 is Asp. In some embodiments, two, three, four, five, six, seven, or all eight of positions 384, 386, 387, 388, 389, 413, 416, and 421 have an amino acid substitution as specified in this paragraph.

[0129] In some embodiments, a CH3 domain polypeptide having modifications in set CH3C comprises a native Asn at position 390. In some embodiments, the modified CH3 domain polypeptide comprises Gly, His, Gln, Leu, Lys, Val, Phe, Ser, Ala, or Asp at position 390. In some embodiments, the modified CH3 domain polypeptide further comprises one, two, three, or four substitutions at positions comprising 380, 391, 392, and 415. In some embodiments, Trp, Tyr, Leu, or Gln may be present at position 380. In some embodiments, Ser, Thr, Gln, or Phe may be present at position 391. In some embodiments, Gln, Phe, or His may be present at position 392. In some embodiments, Glu may be present at position 415.

[0130] In certain embodiments, the modified CH3 domain polypeptide comprises two, three, four, five, six, seven, eight nine, or ten positions selected from the following: Trp, Leu, or Glu at position 380; Tyr or Phe at position 384; Thr at position 386; Glu at position 387; Trp at position 388; Ser, Ala, Val, or Asn at position 389; Ser or Asn at position 390; Thr or Ser at position 413; Glu or Ser at position 415; Glu at position 416; and/or Phe at position 421. In some embodiments, the modified CH3 domain polypeptide comprises all eleven positions as follows: Trp, Leu, or Glu at position 380; Tyr or Phe at position 384; Thr at position 386; Glu at position 387; Trp at position 388; Ser, Ala, Val, or Asn at position 389; Ser or Asn at position 390; Thr or Ser at position 413; Glu or Ser at position 415; Glu at position 416; and/or Phe at position 421.

[0131] In certain embodiments, the modified CH3 domain polypeptide comprises Leu or Met at position 384; Leu, His, or Pro at position 386; Val at position 387; Trp at position 388; Val or Ala at position 389; Pro at position 413; Thr at position 416; and/or Trp at position 421. In some embodiments, the modified CH3 domain polypeptide further comprises Ser, Thr, Gln, or Phe at position 391. In some embodiments, a modified CH3 domain polypeptide further comprises Trp, Tyr, Leu, or Gln at position 380 and/or Gln, Phe, or His at position 392. In some embodiments, Trp is present at position 380 and/or Gln is present at position 392. In some embodiments, a modified CH3 domain polypeptide does not have a Trp at position 380.

[0132] In other embodiments, a modified CH3 domain polypeptide comprises Tyr at position 384; Thr at position 386; Glu or Val and position 387; Trp at position 388; Ser at position 389; Ser or Thr at position 413; Glu at position 416; and/or Phe at position 421. In some embodiments, the modified CH3 domain polypeptide comprises a native Asn at position 390. In certain embodiments, the modified CH3 domain polypeptide further comprises Trp, Tyr, Leu, or Gln at position 380; and/or Glu at position 415. In some embodiments, the modified CH3 domain polypeptide further comprises Trp at position 380 and/or Glu at position 415.

[0133] In additional embodiments, the modified CH3 domain further comprises one, two, or three positions selected from the following: position 414 is Lys, Arg, Gly, or Pro; position 424 is Ser, Thr, Glu, or Lys; and position 426 is Ser, Trp, or Gly.

[0134] In some embodiments, the modified CH3 domain comprises one or more of the following substitutions: Trp at position 380; Thr at position 386; Trp at position 388; Val at position 389; Ser or Thr at position 413; Glu at position 415; and/or Phe at position 421.

[0135] In some embodiments, a modified CH3 domain polypeptide that specifically binds TfR has at least 70% identity, at least 75% identity, at least 80% identity, at least 85% identity, at least 90% identity, or at least 95% identity to amino acids 111-217 of any one of SEQ ID NOS:4-29, 64-127, and 268-274 (e.g., SEQ ID NOS:66, 68, 94, 107-109, 119, and 268-270). In some embodiments, such a modified CH3 domain polypeptide comprises amino acids 154-160 and/or 183-191 of any one of SEQ ID NOS:4-29, 64-127, and 268-274 (e.g., SEQ ID NOS:66, 68, 94, 107-109, 119, and 268-270). In some embodiments, such a modified CH3 domain polypeptide comprises amino acids 150-160 and/or 183-191 of any one of SEQ ID NOS:4-29, 64-127, and 268-274 (e.g., SEQ ID NOS:66, 68, 94, 107-109, 119, and 268-270). In some embodiments, a modified CH3 domain polypeptide comprises amino acids 150-160 and/or 183-196 of any one of SEQ ID NOS:4-29, 64-127, and 268-274 (e.g., SEQ ID NOS:66, 68, 94, 107-109, 119, and 268-270).

[0136] In some embodiments, a modified CH3 domain polypeptide has at least 70% identity, at least 75% identity, at least 80% identity, at least 85% identity, at least 90% identity, or at least 95% identity to amino acids 111-217 of SEQ ID NO:1, with the proviso that the percent identity does not include the set of positions 154, 156, 157, 158, 159, 160, 183, 186, and 191 of SEQ ID NO:1 (positions 384, 386, 387, 388, 389, 390, 413, 416, and 421, according to EU numbering scheme). In some embodiments, the modified CH3 domain polypeptide comprises amino acids 154-160 and/or amino acids 183-191 as set forth in any one of SEQ ID NOS:4-29, 64-127, and 268-274 (e.g., SEQ ID NOS:66, 68, 94, 107-109, 119, and 268-270).

[0137] In some embodiments, a modified CH3 domain polypeptide has at least 70% identity, at least 75% identity, at least 80% identity, at least 85% identity, at least 90% identity, or at least 95% identity to any one of SEQ ID NOS:4-29, 64-127, and 268-274 (e.g., SEQ ID NOS:66, 68, 94, 107-109, 119, and 268-270), with the proviso that at least five, six, seven, eight, nine, ten, eleven, twelve, thirteen, fourteen, fifteen or sixteen of the positions that correspond to positions 150, 154, 156, 157, 158, 159, 160, 161, 162, 183, 184, 185, 186, 191, 194, and 196 of any one of SEQ ID NOS:4-29, 64-127, and 268-274 (e.g., SEQ ID NOS:66, 68, 94, 107-109, 119, and 268-270) (positions 380, 384, 386, 384, 388, 389, 390, 391, 392, 413, 414, 415, 416, 421, 424, and 426, according to EU numbering scheme) are not deleted or substituted.

[0138] In some embodiments, the modified CH3 domain polypeptide has at least 75% identity, at least 80% identity, at least 85% identity, at least 90% identity, or at least 95% identity to any one of SEQ ID NOS:4-29, 64-127, and 268-274 (e.g., SEQ ID NOS:66, 68, 94, 107-109, 119, and 268-270) and also comprises at least five, six, seven, eight, nine, ten, eleven, twelve, thirteen, fourteen, fifteen or sixteen of the positions as follows: Trp, Tyr, Leu, Gln, or Glu at position 380; Leu, Tyr, Met, or Val at position 384; Leu, Thr, His, or Pro at position 386; Val, Pro, or an acidic amino acid at position 387; an aromatic amino acid, e.g., Trp, at position 388; Val, Ser, or Ala at position 389; Ser or Asn at position 390; Ser, Thr, Gln, or Phe at position 391; Gln, Phe, or His at position 392; an acidic amino acid, Ala, Ser, Leu, Thr, or Pro at position 413; Lys, Arg, Gly or Pro at position 414; Glu or Ser at position 415; Thr or an acidic amino acid at position 416; Trp, Tyr, His or Phe at position 421; Ser, Thr, Glu or Lys at position 424; and Ser, Trp, or Gly at position 426.

[0139] In some embodiments, a TfR-binding polypeptide comprises the amino acid sequence of any one of SEQ ID NOS:38-52. In other embodiments, a TfR-binding polypeptide comprises the amino acid sequence of any one of SEQ ID NOS:38-52, but in which one or two amino acids are substituted. In some embodiments, the polypeptide comprises the amino acid sequence of any one of SEQ ID NOS:38-52, but in which three amino acids are substituted.

[0140] In some embodiments, a TfR-binding polypeptide comprises the amino acid sequence of any one of SEQ ID NOS:53-61. In other embodiments, a TfR-binding polypeptide comprises the amino acid sequence of any one of SEQ ID NOS:53-61, but in which one or two amino acids are substituted. In some embodiments, the polypeptide comprises the amino acid sequence of any one of SEQ ID NOS:53-61, but in which three or four amino acids are substituted.

[0141] In some embodiments, a TfR-binding polypeptide comprises the amino acid sequence of any one of SEQ ID NOS:131-167. In other embodiments, a TfR-binding polypeptide comprises the amino acid sequence of any one of SEQ ID NOS:131-167, but in which one or two amino acids are substituted. In some embodiments, the polypeptide comprises the amino acid sequence of any one of SEQ ID NOS:131-167, but in which three amino acids are substituted.

[0142] In some embodiments, a TfR-binding polypeptide comprises the amino acid sequence of any one of SEQ ID NOS:58, 60, and 168-173. In other embodiments, a TfR-binding polypeptide comprises the amino acid sequence of any one of SEQ ID NOS:58, 60, and 168-173, but in which one or two amino acids are substituted. In some embodiments, the polypeptide comprises the amino acid sequence of any one of SEQ ID NOS:58, 60, and 168-173, but in which three or four amino acids are substituted.

[0143] In additional embodiments, a TfR-binding polypeptide comprises amino acids 157-194, amino acids 153-194, or amino acids 153-199, of any one of SEQ ID NOS:4-29, 64-127, and 268-274 (e.g., SEQ ID NOS:66, 68, 94, 107-109, 119, and 268-270). In further embodiments, the polypeptide comprises an amino acid sequence having at least 75% identity, at least 80% identity, at least 85% identity, at least 90% identity, or at least 95% identity to amino acids 157-194 of any one of SEQ ID NOS:4-29, 64-127, and 268-274 (e.g., SEQ ID NOS:66, 68, 94, 107-109, 119, and 268-270), or to amino acids 153-194, or to amino acids 153-199, of any one of SEQ ID NOS:4-29, 64-127, and 268-274 (e.g., SEQ ID NOS:66, 68, 94, 107-109, 119, and 268-270).

[0144] In some embodiments, the polypeptide comprises any one of SEQ ID NOS:4-29, 64-127, and 268-274 (e.g., SEQ ID NOS:66, 68, 94, 107-109, 119, and 268-270). In further embodiments, the polypeptide may have at least 75% identity, at least 80% identity, at least 85% identity, at least 90% identity, or at least 95% identity to any one of SEQ ID NOS:4-29, 64-127, and 268-274 (e.g., SEQ ID NOS:66, 68, 94, 107-109, 119, and 268-270).

### FcRn Binding Sites

[0145] A polypeptide described herein that can be transported across the BBB additionally may comprise an FcRn binding site. In some embodiments, the FcRn binding site is within the modified Fc polypeptide or a fragment thereof.

[0146] In some embodiments, the FcRn binding site comprises a native FcRn binding site. In some embodiments, the FcRn binding site does not comprise amino acid changes relative to the amino acid sequence of a native FcRn binding site. In some embodiments, the native FcRn binding site is an IgG binding site, e.g., a human IgG binding site. In some embodiments, the FcRn binding site comprises a modification that alters FcRn binding.

[0147] In some embodiments, an FcRn binding site has one or more amino acid residues that are mutated, e.g., substituted, wherein the mutation(s) increase serum half-life or do not substantially reduce serum half-life (i.e., reduce serum half-life by no more than 25% compared to a counterpart protein having the wild-type residues at the mutated positions when assayed under the same conditions). In some embodiments, an FcRn binding site has one or more amino acid residues that are substituted at positions 21 to 26, 198, and 203 to 206, wherein the positions are determined with reference to SEQ ID NO:1.

[0148] In some embodiments, the FcRn binding site comprises one or more mutations, relative to a native human IgG sequence, that extend serum half-life of the modified polypeptide. In some embodiments, a mutation, e.g., a substitution, is introduced at one or more of positions 14-27, 49-54, 77-87, 153-160, and 198-205 as determined with reference to SEQ ID NO:1 (which positions correspond to positions 244-257, 279-284, 307-317, 383-390, and 428-435 using EU numbering). In some embodiments, one or more mutations are introduced at positions 21, 22, 24, 25, 26, 77, 78, 79, 81, 82, 84, 155, 156, 157, 159, 198, 203, 204, or 206 as determined with reference to SEQ ID NO:1 (which positions correspond to positions 251, 252, 254, 255, 256, 307, 308, 309, 311, 312, 314, 385, 386, 387, 389, 428, 433, 434, or 436 using EU numbering). In some embodiments, mutations are introduced into one, two, or three of positions 22, 24, and 25 as determined with reference to SEQ ID NO:1 (which correspond to positions 252, 254, and 256 using EU numbering). In some embodiments, the mutations are M22Y, S24T, and T26E as numbered with reference to SEQ ID NO:1. In some embodiments, a modified Fc polypeptide described herein further comprises mutations M22Y, S24T, and T26E. In some embodiments, mutations are introduced into one or two of positions 198 and 204 as determined with reference to SEQ ID NO:1 (which correspond to positions 428 and 434 using EU numbering). In some embodiments, the mutations are M198L and N204S as numbered with reference to SEQ ID NO:1. In some embodiments, a modified Fc polypeptide described herein further comprises mutation N204S with or without M198L. In some embodiments, a modified Fc polypeptide comprises a substitution at one, two or all three of positions T307, E380, and N434 according to EU numbering (which correspond to T77, E150, and N204 as numbered with reference to SEQ ID NO:1). In some embodiments, the mutations are T307Q and N434A (SEQ ID NO:1, T77Q and N204A). In some embodiments, a modified Fc polypeptide comprises mutations T307A, E380A, and N434A (SEQ ID NO:1, T77A, E150A, and N204A). In some embodiments, a modified Fc polypeptide comprises substitutions at positions T250 and M428 (which correspond to T20 and M198 as numbered with reference to SEQ ID NO:1). In some embodiments, the Fc polypeptide comprises mutations T250Q and/or M428L (SEQ ID NO:1, T20Q and M198L). In some embodiments, a modified Fc polypeptide comprises substitutions at positions M428 and N434 (which correspond to M198 and N204 as numbered with reference to SEQ ID NO:1). In some embodiments, a modified Fc polypeptide comprises substitutions M428L and N434S (which correspond to M198L and N204S as numbered with reference to SEQ ID NO:1). In some embodiments, a modified Fc polypeptide comprises an N434S or N434A substitution (which corresponds to N204S or N204A as numbered with reference to SEQ ID NO:1).

### IV. Mutations that Reduce Effector Function or FcγR Binding

[0149] An Fc polypeptide as provided herein that is modified to bind TfR and initiate transport across the BBB may also comprise additional mutations to reduce effector function. As described herein, by introducing both the TfR-binding site and mutations that reduce FcγR binding to the same Fc polypeptide of the Fc polypeptide dimer, it was possible to reduce effector function upon TfR binding, leading to TfR binding without substantial depletion of reticulocytes, but still retain effector function (e.g., ADCC or CDC) when the Fc polypeptide dimer is fused to a therapeutic Fab and bound to the Fab's target antigen.

[0150] In some embodiments, an Fc polypeptide comprising a modified CH3 domain has an effector function, i.e., the ability to induce certain biological functions upon binding to an Fc receptor expressed on an effector cell that mediates the effector function. Effector cells include, but are not limited to, monocytes, macrophages, neutrophils, dendritic cells, eosinophils, mast cells, platelets, B cells, large granular lymphocytes, Langerhans' cells, natural killer (NK) cells, and cytotoxic T cells.

[0151] Examples of effector functions include, but are not limited to, C1q binding and CDC, Fc receptor binding, ADCC, antibody-dependent cell-mediated phagocytosis (ADCP), down-regulation of cell surface receptors (e.g., B cell receptor), and B-cell activation. Effector functions may vary with the antibody class. For example, native human IgG1 and IgG3 antibodies can elicit ADCC and CDC activities upon binding to an appropriate Fc receptor present on an immune system cell; and native human IgG1, IgG2, IgG3, and IgG4 can elicit ADCP functions upon binding to the appropriate Fc receptor present on an immune cell.

[0152] In some embodiments, an Fc polypeptide having an TfR-binding site as described herein may include additional modifications that reduce effector function, i.e., reduce effector function upon TfR binding. Having reduced effector function upon TfR binding of the Fc polypeptide dimer is desirable because it leads to reduced reticulocyte depletion since reticulocytes also have TfR on the cell surface. As described in detail herein, Fc polypeptide dimers having the cis configuration, i.e., Fc polypeptide dimers having both the TfR-binding site and mutations that reduce effector function on the same Fc polypeptide of the Fc polypeptide dimer, exhibit TfR binding without substantial depletion of reticulocytes, but still retain effector function (e.g., ADCC or CDC) when the Fc polypeptide dimer is fused to a therapeutic Fab and bound to the Fab's target antigen. Having effector function when the Fc polypeptide dimer is fused to a therapeutic Fab that is bound to the Fab's target antigen is desirable in, e.g., cancer therapeutics (e.g., brain cancer therapeutics).

[0153] Illustrative Fc polypeptide mutations that modulate an effector function include, but are not limited to, substitutions in a CH2 domain, e.g., at positions corresponding to positions 4 and 5 of SEQ ID NO:1 (positions 234 and 235 according to EU numbering scheme). In some embodiments, the substitutions in a modified CH2 domain comprise Ala at positions 4 and 5 of SEQ ID NO:1. In some embodiments, the substitutions in a modified CH2 domain comprise Ala at positions 4 and 5 and Gly at position 99 of SEQ ID NO:1.

[0154] Additional Fc polypeptide mutations that modulate an effector function include, but are not limited to, one or more substitutions at positions 238, 265, 269, 270, 297, 327 and 329 (EU numbering scheme, which correspond to positions 8, 35, 39, 40, 67, 97, and 99 as numbered with reference to SEQ ID NO:1). Illustrative substitutions (as numbered with EU numbering scheme), include the following: position 329 may have a mutation in which proline is substituted with a glycine or arginine or an amino acid residue large enough to destroy the Fc/Fcγ receptor interface that is formed between proline 329 of the Fc and tryptophan residues Trp 87 and Trp 110 of FcγRIII. Additional illustrative substitutions include S228P, E233P, L235E, N297A, N297D, and P331 S. Multiple substitutions may also be present, e.g., L234A and L235A of a human IgG1 Fc region; L234A, L235A, and P329G of a human IgG1 Fc region; S228P and L235E of a human IgG4 Fc region; L234A and G237A of a human IgG1 Fc region; L234A, L235A, and G237A of a human IgG1 Fc region; V234A and G237A of a human IgG2 Fc region; L235A, G237A, and E318A of a human IgG4 Fc region; and S228P and L236E of a human IgG4 Fc region. In some embodiments, an Fc polypeptide may have one or more amino acid substitutions that modulate ADCC, e.g., substitutions at positions 298, 333, and/or 334 of the Fc region, according to the EU numbering scheme.

[0155] In some embodiments, a polypeptide as described herein may have one or more amino acid substitutions that increase or decrease ADCC or may have mutations that alter C1q binding and/or CDC.

[0156] In particular embodiments, an Fc polypeptide having a TfR-binding site may be modified to reduce effector function, i.e., reduce FcγR binding. In some embodiments, an Fc polypeptide having a TfR-binding site may include mutations L234A and L235A (EU numbering scheme, which correspond to positions 4 and 5 as numbered with reference to SEQ ID NO:1). In other embodiments, an Fc polypeptide having a TfR-binding site may include mutations L234A, L235A, and P329G (EU numbering scheme, which correspond to positions 4, 5, and 99 as numbered with reference to SEQ ID NO:1).

### V. Effector Function-Positive, TfR-Binding Fc Polypeptide Dimers

[0157] In certain aspects, the present disclosure provides effector function-positive, TfR-binding Fc polypeptide dimers that are modified to bind to TfR and to have reduced FcγR binding when bound to TfR, but have limited or no reduction of FcγR binding when not bound to TfR. These modified Fc polypeptide dimers may be fused to therapeutic Fabs to transport them across the BBB. These modified Fc polypeptide dimers are demonstrated to have reduced effector function upon TfR binding. When the modified Fc polypeptide dimer is fused to a Fab, the Fc polypeptide dimer retains effector function when the Fab is bound to its target (e.g., a target on a cancer cell). In this manner, the effector function-positive, TfR-binding Fc polypeptide dimers described herein are able to transport the Fab across the BBB without substantial depletion of reticulocytes (which also contain TfR on the cell surface), and also serve its therapeutic purpose by exhibiting effector function that can target extracellular aggregates (e.g., plaque) or certain diseased cells (e.g., cancer cells) in the brain to destruction when the Fab is bound to its target.

[0158] The effector function-positive, TfR-binding Fc polypeptide dimers described herein have a cis configuration, which means that only one (not both) of the Fc polypeptides in the Fc polypeptide dimer is modified to have a TfR-binding site and modifications that reduce FcγR binding when bound to TfR. The other Fc polypeptide in the Fc polypeptide dimer does not contain either a TfR-binding site or modifications that substantially reduce FcγR binding. A trans configuration of the modified Fc polypeptide dimers refers to an Fc polypeptide dimer in which one of the two Fc polypeptides contains a TfR-binding site, while the other Fc polypeptide contains modifications that reduce FcγR binding, e.g., when bound to TfR. As demonstrated herein, modified Fc polypeptide dimers having the cis configuration, but not the trans configuration, are able to reduce reticulocyte depletion in the blood and bone marrow (see, e.g., FIGS. 2A-2D).

[0159] In one embodiment, an effector function-positive, TfR-binding Fc polypeptide dimer comprises: (a) a first Fc polypeptide comprising a TfR-binding site that specifically binds TfR, and amino acid modifications L234A and L235A, according to EU numbering scheme, and (b) a second Fc polypeptide that does not contain a TfR-binding site or any modifications that reduce FcγR binding.

[0160] In another embodiment, an effector function-positive, TfR-binding Fc polypeptide dimer comprises: (a) a first Fc polypeptide comprising a TfR-binding site that specifically binds TfR, amino acid modifications L234A and L235A, and amino acid modification N434S with or without M428L, according to EU numbering scheme, and (b) a second Fc polypeptide that does not contain a TfR-binding site or any modifications that reduce FcγR binding.

[0161] In another embodiment, an effector function-positive, TfR-binding Fc polypeptide dimer comprises: (a) a first Fc polypeptide comprising a TfR-binding site that specifically binds TfR, amino acid modifications L234A and L235A, and amino acid modification N434S with or without M428L, according to EU numbering scheme, and (b) a second Fc polypeptide that comprises amino acid modification N434S with or without M428L and does not contain a TfR-binding site or any modifications that reduce FcγR binding.

[0162] In one embodiment, an effector function-positive, TfR-binding Fc polypeptide dimer comprises: (a) a first Fc polypeptide comprising a TfR-binding site that specifically binds TfR, amino acid modifications L234A and L235A, and a knob mutation T366W, according to EU numbering scheme, and (b) a second Fc polypeptide that comprises hole mutations T366S, L368A, and Y407V, according to EU numbering scheme, and does not contain a TfR-binding site or any modifications that reduce FcγR binding.

[0163] In another embodiment, an effector function-positive, TfR-binding Fc polypeptide dimer comprises: (a) a first Fc polypeptide comprising a TfR-binding site that specifically binds TfR, amino acid modifications L234A, L235A, and P329G, and a knob mutation T366W, according to EU numbering scheme, and (b) a second Fc polypeptide that comprises hole mutations T366S, L368A, and Y407V, according to EU numbering scheme, and does not contain a TfR-binding site or any modifications that reduce FcγR binding.

[0164] In another embodiment, an effector function-positive, TfR-binding Fc polypeptide dimer comprises: (a) a first Fc polypeptide comprising a TfR-binding site that specifically binds TfR, amino acid modifications L234A and L235A, a knob mutation T366W, and amino acid modifications M252Y, S254T, and T256E, according to EU numbering scheme, and (b) a second Fc polypeptide that comprises hole mutations T366S, L368A, and Y407V, according to EU numbering scheme, and does not contain a TfR-binding site or any modifications that reduce FcγR binding.

[0165] In another embodiment, an effector function-positive, TfR-binding Fc polypeptide dimer comprises: (a) a first Fc polypeptide comprising a TfR-binding site that specifically binds TfR, amino acid modifications L234A and L235A, a knob mutation T366W, and amino acid modification N434S with or without M428L, according to EU numbering scheme, and (b) a second Fc polypeptide that comprises hole mutations T366S, L368A, and Y407V, according to EU numbering scheme, and does not contain a TfR-binding site or any modifications that reduce FcγR binding.

[0166] In another embodiment, an effector function-positive, TfR-binding Fc polypeptide dimer comprises: (a) a first Fc polypeptide comprising a TfR-binding site that specifically binds TfR, amino acid modifications L234A, L235A, and P329G, a knob mutation T366W, and amino acid modifications M252Y, S254T, and T256E, according to EU numbering scheme, and (b) a second Fc polypeptide that comprises hole mutations T366S, L368A, and Y407V, according to EU numbering scheme, and does not contain a TfR-binding site or any modifications that reduce FcγR binding.

[0167] In another embodiment, an effector function-positive, TfR-binding Fc polypeptide dimer comprises: (a) a first Fc polypeptide comprising a TfR-binding site that specifically binds TfR, amino acid modifications L234A, L235A, and P329G, a knob mutation T366W, and amino acid modification N434S with or without M428L, according to EU numbering scheme, and (b) a second Fc polypeptide that comprises hole mutations T366S, L368A, and Y407V, according to EU numbering scheme, and does not contain a TfR-binding site or any modifications that reduce FcγR binding.

[0168] In another embodiment, an effector function-positive, TfR-binding Fc polypeptide dimer comprises: (a) a first Fc polypeptide comprising a TfR-binding site that specifically binds TfR, amino acid modifications L234A and L235A, and a knob mutation T366W, according to EU numbering scheme, and (b) a second Fc polypeptide that comprises hole mutations T366S, L368A, and Y407V and amino acid modifications M252Y, S254T, and T256E, according to EU numbering scheme, and does not contain a TfR-binding site or any modifications that reduce FcγR binding.

[0169] In another embodiment, an effector function-positive, TfR-binding Fc polypeptide dimer comprises: (a) a first Fc polypeptide comprising a TfR-binding site that specifically binds TfR, amino acid modifications L234A and L235A, and a knob mutation T366W, according to EU numbering scheme, and (b) a second Fc polypeptide that comprises hole mutations T366S, L368A, and Y407V and amino acid modification N434S with or without M428L, according to EU numbering scheme, and does not contain a TfR-binding site or any modifications that reduce FcγR binding.

[0170] In another embodiment, an effector function-positive, TfR-binding Fc polypeptide dimer comprises: (a) a first Fc polypeptide comprising a TfR-binding site that specifically binds TfR, amino acid modifications L234A, L235A, and P329G, and a knob mutation T366W, according to EU numbering scheme, and (b) a second Fc polypeptide that comprises hole mutations T366S, L368A, and Y407V and amino acid modifications M252Y, S254T, and T256E, according to EU numbering scheme, and does not contain a TfR-binding site or any modifications that reduce FcγR binding.

[0171] In another embodiment, an effector function-positive, TfR-binding Fc polypeptide dimer comprises: (a) a first Fc polypeptide comprising a TfR-binding site that specifically binds TfR, amino acid modifications L234A, L235A, and P329G, and a knob mutation T366W, according to EU numbering scheme, and (b) a second Fc polypeptide that comprises hole mutations T366S, L368A, and Y407V and amino acid modification N434S with or without M428L, according to EU numbering scheme, and does not contain a TfR-binding site or any modifications that reduce FcγR binding.

[0172] In another embodiment, an effector function-positive, TfR-binding Fc polypeptide dimer comprises: (a) a first Fc polypeptide comprising a TfR-binding site that specifically binds TfR, amino acid modifications L234A and L235A, a knob mutation T366W, and amino acid modifications M252Y, S254T, and T256E, according to EU numbering scheme, and (b) a second Fc polypeptide that comprises hole mutations T366S, L368A, and Y407V and amino acid modifications M252Y, S254T, and T256E, according to EU numbering scheme, and does not contain a TfR-binding site or any modifications that reduce FcγR binding.

[0173] In another embodiment, an effector function-positive, TfR-binding Fc polypeptide dimer comprises: (a) a first Fc polypeptide comprising a TfR-binding site that specifically binds TfR, amino acid modifications L234A and L235A, a knob mutation T366W, and amino acid modification N434S with or without M428L, according to EU numbering scheme, and (b) a second Fc polypeptide that comprises hole mutations T366S, L368A, and Y407V and amino acid modification N434S with or without M428L, according to EU numbering scheme, and does not contain a TfR-binding site or any modifications that reduce FcγR binding.

[0174] In another embodiment, an effector function-positive, TfR-binding Fc polypeptide dimer comprises: (a) a first Fc polypeptide comprising a TfR-binding site that specifically binds TfR, amino acid modifications L234A, L235A, and P329G, a knob mutation T366W, and amino acid modifications M252Y, S254T, and T256E, according to EU numbering scheme, and (b) a second Fc polypeptide that comprises hole mutations T366S, L368A, and Y407V and amino acid modifications M252Y, S254T, and T256E, according to EU numbering scheme, and does not contain a TfR-binding site or any modifications that reduce FcγR binding.

[0175] In another embodiment, an effector function-positive, TfR-binding Fc polypeptide dimer comprises: (a) a first Fc polypeptide comprising a TfR-binding site that specifically binds TfR, amino acid modifications L234A, L235A, and P329G, a knob mutation T366W, and amino acid modification N434S with or without M428L, according to EU numbering scheme, and (b) a second Fc polypeptide that comprises hole mutations T366S, L368A, and Y407V and amino acid modification N434S with or without M428L, according to EU numbering scheme, and does not contain a TfR-binding site or any modifications that reduce FcγR binding.

[0176] In another embodiment, an effector function-positive, TfR-binding Fc polypeptide dimer comprises: (a) a first Fc polypeptide comprising a TfR-binding site that specifically binds TfR, amino acid modifications L234A and L235A, and hole mutations T366S, L368A, and Y407V, according to EU numbering scheme, and (b) a second Fc polypeptide that comprises a knob mutation T366W, according to EU numbering scheme, and does not contain a TfR-binding site or any modifications that reduce FcγR binding.

[0177] In another embodiment, an effector function-positive, TfR-binding Fc polypeptide dimer comprises: (a) a first Fc polypeptide comprising a TfR-binding site that specifically binds TfR, amino acid modifications L234A, L235A, and P329G, and hole mutations T366S, L368A, and Y407V, according to EU numbering scheme, and (b) a second Fc polypeptide that comprises a knob mutation T366W, according to EU numbering scheme, and does not contain a TfR-binding site or any modifications that reduce FcγR binding.

[0178] In another embodiment, an effector function-positive, TfR-binding Fc polypeptide dimer comprises: (a) a first Fc polypeptide comprising a TfR-binding site that specifically binds TfR, amino acid modifications L234A and L235A, hole mutations T366S, L368A, and Y407V, and amino acid modifications M252Y, S254T, and T256E, according to EU numbering scheme, and (b) a second Fc polypeptide that comprises a knob mutation T366W according to EU numbering scheme, and does not contain a TfR-binding site or any modifications that reduce FcγR binding.

[0179] In another embodiment, an effector function-positive, TfR-binding Fc polypeptide dimer comprises: (a) a first Fc polypeptide comprising a TfR-binding site that specifically binds TfR, amino acid modifications L234A and L235A, hole mutations T366S, L368A, and Y407V, and amino acid modification N434S with or without M428L, according to EU numbering scheme, and (b) a second Fc polypeptide that comprises a knob mutation T366W according to EU numbering scheme, and does not contain a TfR-binding site or any modifications that reduce FcγR binding.

[0180] In another embodiment, an effector function-positive, TfR-binding Fc polypeptide dimer comprises: (a) a first Fc polypeptide comprising a TfR-binding site that specifically binds TfR, amino acid modifications L234A, L235A, and P329G, hole mutations T366S, L368A, and Y407V, and amino acid modifications M252Y, S254T, and T256E, according to EU numbering scheme, and (b) a second Fc polypeptide that comprises a knob mutation T366W, according to EU numbering scheme, and does not contain a TfR-binding site or any modifications that reduce FcγR binding.

[0181] In another embodiment, an effector function-positive, TfR-binding Fc polypeptide dimer comprises: (a) a first Fc polypeptide comprising a TfR-binding site that specifically binds TfR, amino acid modifications L234A, L235A, and P329G, hole mutations T366S, L368A, and Y407V, and amino acid modification N434S with or without M428L, according to EU numbering scheme, and (b) a second Fc polypeptide that comprises a knob mutation T366W, according to EU numbering scheme, and does not contain a TfR-binding site or any modifications that reduce FcγR binding.

[0182] In another embodiment, an effector function-positive, TfR-binding Fc polypeptide dimer comprises: (a) a first Fc polypeptide comprising a TfR-binding site that specifically binds TfR, amino acid modifications L234A and L235A, and hole mutations T366S, L368A, and Y407V, according to EU numbering scheme, and (b) a second Fc polypeptide that comprises a knob mutation T366W and amino acid modifications M252Y, S254T, and T256E, according to EU numbering scheme, and does not contain a TfR-binding site or any modifications that reduce FcγR binding.

[0183] In another embodiment, an effector function-positive, TfR-binding Fc polypeptide dimer comprises: (a) a first Fc polypeptide comprising a TfR-binding site that specifically binds TfR, amino acid modifications L234A and L235A, and hole mutations T366S, L368A, and Y407V, according to EU numbering scheme, and (b) a second Fc polypeptide that comprises a knob mutation T366W and amino acid modification N434S with or without M428L, according to EU numbering scheme, and does not contain a TfR-binding site or any modifications that reduce FcγR binding.

[0184] In another embodiment, an effector function-positive, TfR-binding Fc polypeptide dimer comprises: (a) a first Fc polypeptide comprising a TfR-binding site that specifically binds TfR, amino acid modifications L234A, L235A, and P329G, and hole mutations T366S, L368A, and Y407V, according to EU numbering scheme, and (b) a second Fc polypeptide that comprises a knob mutation T366W and amino acid modifications M252Y, S254T, and T256E, according to EU numbering scheme, and does not contain a TfR-binding site or any modifications that reduce FcγR binding.

[0185] In another embodiment, an effector function-positive, TfR-binding Fc polypeptide dimer comprises: (a) a first Fc polypeptide comprising a TfR-binding site that specifically binds TfR, amino acid modifications L234A, L235A, and P329G, and hole mutations T366S, L368A, and Y407V, according to EU numbering scheme, and (b) a second Fc polypeptide that comprises a knob mutation T366W and amino acid modification N434S with or without M428L, according to EU numbering scheme, and does not contain a TfR-binding site or any modifications that reduce FcγR binding.

[0186] In another embodiment, an effector function-positive, TfR-binding Fc polypeptide dimer comprises: (a) a first Fc polypeptide comprising a TfR-binding site that specifically binds TfR, amino acid modifications L234A and L235A, hole mutations T366S, L368A, and Y407V, and amino acid modifications M252Y, S254T, and T256E, according to EU numbering scheme, and (b) a second Fc polypeptide that comprises a knob mutation T366W and amino acid modifications M252Y, S254T, and T256E, according to EU numbering scheme, and does not contain a TfR-binding site or any modifications that reduce FcγR binding.

[0187] In another embodiment, an effector function-positive, TfR-binding Fc polypeptide dimer comprises: (a) a first Fc polypeptide comprising a TfR-binding site that specifically binds TfR, amino acid modifications L234A and L235A, hole mutations T366S, L368A, and Y407V, and amino acid modification N434S with or without M428L, according to EU numbering scheme, and (b) a second Fc polypeptide that comprises a knob mutation T366W and amino acid modification N434S with or without M428L, according to EU numbering scheme, and does not contain a TfR-binding site or any modifications that reduce FcγR binding.

[0188] In another embodiment, an effector function-positive, TfR-binding Fc polypeptide dimer comprises: (a) a first Fc polypeptide comprising a TfR-binding site that specifically binds TfR, amino acid modifications L234A, L235A, and P329G, hole mutations T366S, L368A, and Y407V, and amino acid modifications M252Y, S254T, and T256E, according to EU numbering scheme, and (b) a second Fc polypeptide that comprises a knob mutation T366W and amino acid modifications M252Y, S254T, and T256E, according to EU numbering scheme, and does not contain a TfR-binding site or any modifications that reduce FcγR binding.

[0189] In another embodiment, an effector function-positive, TfR-binding Fc polypeptide dimer comprises: (a) a first Fc polypeptide comprising a TfR-binding site that specifically binds TfR, amino acid modifications L234A, L235A, and P329G, hole mutations T366S, L368A, and Y407V, and amino acid modification N434S with or without M428L, according to EU numbering scheme, and (b) a second Fc polypeptide that comprises a knob mutation T366W and amino acid modification N434S with or without M428L, according to EU numbering scheme, and does not contain a TfR-binding site or any modifications that reduce FcγR binding.

### VI. Measuring Effector Function or FcγR Binding

[0190] Methods for analyzing binding affinity, binding kinetics, and cross-reactivity between an Fc polypeptide dimer and FcγR are known in the art. These methods include, but are not limited to, solid-phase binding assays (e.g., ELISA assay), immunoprecipitation, surface plasmon resonance (e.g., Biacore™ (GE Healthcare, Piscataway, N.J.)), kinetic exclusion assays (e.g., KinExA®), flow cytometry, fluorescence-activated cell sorting (FACS), BioLayer interferometry (e.g., Octet® (ForteBio, Inc., Menlo Park, Calif.)), and Western blot analysis. In some embodiments, ELISA is used to determine binding affinity and/or cross-reactivity. Methods for performing ELISA assays are known in the art. In some embodiments, surface plasmon resonance (SPR) is used to determine binding affinity, binding kinetics, and/or cross-reactivity. In some embodiments, kinetic exclusion assays are used to determine binding affinity, binding kinetics, and/or cross-reactivity. In some embodiments, BioLayer interferometry assays are used to determine binding affinity, binding kinetics, and/or cross-reactivity.

[0191] ADCC is a type of immune response in which antibodies bind to antigens on the surface of pathogenic or tumorigenic target cells and identifies them for destruction by effector cells, e.g., peripheral blood mononuclear cells (e.g., natural killer (NK) cells, T cells, and B cells). Effector cells bearing FcγR recognize and bind the Fc region of the antibodies bound to the target cell. The antibodies thus confer specificity to the target cell killing. CDC is initiated when C1q, the initiating component of the classical complement pathway, is bound to the Fc region of target-bound antibodies. ADCC and CDC activities may be determined in a standard in vivo or in vitro assay of cell killing. Methods for determining ADCC and CDC activities are available in the art. In some embodiments, the methods may involve labeling target cells with a radioactive material, such as ⁵¹Cr, or a fluorescent dye, such as Calcein-AM. The labeled cells may be incubated with the antibody and effector cells and killing of the target cells by ADCC or CDC may be detected by the release of radioactivity or fluorescence.

[0192] Other assays to measure ADCC and CDC activities include, e.g., a lactate dehydrogenase (LDH) release assay. When the cell membranes are compromised or damaged in any way, LDH, a soluble yet stable enzyme in the cytoplasm, is released into the surrounding extracellular space. The presence of this enzyme in the culture medium can be used as a cell death marker. The relative amounts of live and dead cells within the medium can then be quantitated by measuring the amount of released LDH using a colorimetric or fluorometric LDH cytotoxicity assay.

### VII. Additional Mutations in an Fc Region that Comprises a Modified CH3 Domain Polypeptide

[0193] An Fc polypeptide as provided herein that is modified to bind TfR and initiate transport across the BBB may also comprise additional mutations, e.g., to increase serum stability or serum half-life, to modulate effector function, to influence glycosylation, to reduce immunogenicity in humans, and/or to provide for knob and hole heterodimerization of Fc polypeptides.

[0194] In some embodiments, a modified Fc polypeptide described herein has an amino acid sequence identity of at least about 75%, 76%, 77%, 78%, 79%, 80%, 81%, 82%, 83%, 84%, 85%, 86%, 87%, 88%, 89%, 90%, 91%, 92%, 93%, 94%, 95%, 96%, 97%, 98%, or 99% to a corresponding wild-type Fc polypeptide (e.g., a human IgG1, IgG2, IgG3, or IgG4 Fc polypeptide).

[0195] A modified Fc polypeptide described herein may also have other mutations introduced outside of the specified sets of amino acids, e.g., to influence glycosylation, to increase serum half-life or, for CH3 domains, to provide for knob and hole heterodimerization of polypeptides that comprise the modified CH3 domain. Generally, the method involves introducing a protuberance (“knob”) at the interface of a first polypeptide and a corresponding cavity (“hole”) in the interface of a second polypeptide, such that the protuberance can be positioned in the cavity so as to promote heterodimer formation and hinder homodimer formation. Protuberances are constructed by replacing small amino acid side chains from the interface of the first polypeptide with larger side chains (e.g., tyrosine or tryptophan). Compensatory cavities of identical or similar size to the protuberances are created in the interface of the second polypeptide by replacing large amino acid side chains with smaller ones (e.g., alanine or threonine). Such additional mutations are at a position in the polypeptide that does not have a negative effect on binding of the modified CH3 domain to the TfR.

[0196] In one illustrative embodiment of a knob and hole approach for dimerization, a position corresponding to position 136 of SEQ ID NO:1 of a first Fc polypeptide subunit to be dimerized has a tryptophan in place of a native threonine and a second Fc polypeptide subunit of the dimer has a valine at a position corresponding to position 177 of SEQ ID NO:1 in place of the native tyrosine. The second subunit of the Fc polypeptide may further comprise a substitution in which the native threonine at the position corresponding to position 136 of SEQ ID NO:1 is substituted with a serine and a native leucine at the position corresponding to position 138 of SEQ ID NO:1 is substituted with an alanine.

[0197] A modified Fc polypeptide as described herein may also be engineered to contain other modifications for heterodimerization, e.g., electrostatic engineering of contact residues within a CH3-CH3 interface that are naturally charged or hydrophobic patch modifications.

[0198] In some embodiments, modifications to enhance serum half-life may be introduced. For example, in some embodiments, a modified Fc polypeptide as described herein comprises a CH2 domain comprising a Tyr at a position corresponding to position 22 of SEQ ID NO:1, Thr at a position corresponding to 24 of SEQ ID NO:1, and Glu at a position corresponding to position 26 of SEQ ID NO:1. Alternatively, a modified Fc polypeptide as described herein may comprise M198L and N204S substitutions as numbered with reference to SEQ ID NO:1. Alternatively, a modified Fc polypeptide as described herein may comprise an N204S or N204A substitution as numbered with reference to SEQ ID NO:1.

### Illustrative Fc Polypeptides Comprising Additional Mutations

[0199] A modified Fc polypeptide as described herein (e.g., any one of clones CH3C.35.20.1, CH3C.35.23.2, CH3C.35.23.3, CH3C.35.23.4, CH3C.35.21.17.2, CH3C.35.23, CH3C.35.21, CH3C.35.20.1.1, CH3C.35.23.2.1, and CH3C.35.23.1.1) may comprise additional mutations including a knob mutation (e.g., T136W as numbered with reference to SEQ ID NO:1), hole mutations (e.g., T136S, L138A, and Y177V as numbered with reference to SEQ ID NO:1), mutations that modulate effector function (e.g., L4A, L5A, and/or P99G (e.g., L4A and L5A) as numbered with reference to SEQ ID NO:1), and/or mutations that increase serum stability or serum half-life (e.g., (i) M22Y, S24T, and T26E as numbered with reference to SEQ ID NO:1, or (ii) N204S with or without M198L as numbered with reference to SEQ ID NO:1).

[0200] In some embodiments, a modified Fc polypeptide as described herein (e.g., any one of clones CH3C.35.20.1, CH3C.35.23.2, CH3C.35.23.3, CH3C.35.23.4, CH3C.35.21.17.2, CH3C.35.23, CH3C.35.21, CH3C.35.20.1.1, CH3C.35.23.2.1, and CH3C.35.23.1.1) may have a knob mutation (e.g., T136W as numbered with reference to SEQ ID NO:1) and at least 85% identity, at least 90% identity, or at least 95% identity to the sequence of any one of SEQ ID NOS:4-29, 64-127, and 268-274 (e.g., SEQ ID NOS:66, 68, 94, 107-109, 119, and 268-270). In some embodiments, a modified Fc polypeptide having the sequence of any one of SEQ ID NOS:4-29, 64-127, and 268-274 (e.g., SEQ ID NOS:66, 68, 94, 107-109, 119, and 268-270) may be modified to have a knob mutation.

[0201] In some embodiments, a modified Fc polypeptide as described herein (e.g., any one of clones CH3C.35.20.1, CH3C.35.23.2, CH3C.35.23.3, CH3C.35.23.4, CH3C.35.21.17.2, CH3C.35.23, CH3C.35.21, CH3C.35.20.1.1, CH3C.35.23.2.1, and CH3C.35.23.1.1) may have a knob mutation (e.g., T136W as numbered with reference to SEQ ID NO:1), mutations that modulate effector function (e.g., L4A, L5A, and/or P99G (e.g., L4A and L5A) as numbered with reference to SEQ ID NO:1), and at least 85% identity, at least 90% identity, or at least 95% identity to the sequence of any one of SEQ ID NOS:4-29, 64-127, and 268-274 (e.g., SEQ ID NOS:66, 68, 94, 107-109, 119, and 268-270). In some embodiments, a modified Fc polypeptide having the sequence of any one of SEQ ID NOS:4-29, 64-127, and 268-274 (e.g., SEQ ID NOS:66, 68, 94, 107-109, 119, and 268-270) may be modified to have a knob mutation and mutations that modulate effector function.

[0202] In some embodiments, a modified Fc polypeptide as described herein (e.g., any one of clones CH3C.35.20.1, CH3C.35.23.2, CH3C.35.23.3, CH3C.35.23.4, CH3C.35.21.17.2, CH3C.35.23, CH3C.35.21, CH3C.35.20.1.1, CH3C.35.23.2.1, and CH3C.35.23.1.1) may have a knob mutation (e.g., T136W as numbered with reference to SEQ ID NO:1), mutations that increase serum stability or serum half-life (e.g., (i) M22Y, S24T, and T26E as numbered with reference to SEQ ID NO:1, or (ii) N204S with or without M198L as numbered with reference to SEQ ID NO:1), and at least 85% identity, at least 90% identity, or at least 95% identity to the sequence of any one of SEQ ID NOS:4-29, 64-127, and 268-274 (e.g., SEQ ID NOS:66, 68, 94, 107-109, 119, and 268-270). In some embodiments, a modified Fc polypeptide having the sequence of any one of SEQ ID NOS:4-29, 64-127, and 268-274 (e.g., SEQ ID NOS:66, 68, 94, 107-109, 119, and 268-270) may be modified to have a knob mutation and mutations that increase serum stability or serum half-life.

[0203] In some embodiments, a modified Fc polypeptide as described herein (e.g., any one of clones CH3C.35.20.1, CH3C.35.23.2, CH3C.35.23.3, CH3C.35.23.4, CH3C.35.21.17.2, CH3C.35.23, CH3C.35.21, CH3C.35.20.1.1, CH3C.35.23.2.1, and CH3C.35.23.1.1) may have a knob mutation (e.g., T136W as numbered with reference to SEQ ID NO:1), mutations that modulate effector function (e.g., L4A, L5A, and/or P99G (e.g., L4A and L5A) as numbered with reference to SEQ ID NO:1), mutations that increase serum stability or serum half-life (e.g., (i) M22Y, S24T, and T26E as numbered with reference to SEQ ID NO:1, or (ii) N204S with or without M198L as numbered with reference to SEQ ID NO:1), and at least 85% identity, at least 90% identity, or at least 95% identity to the sequence of any one of SEQ ID NOS:4-29, 64-127, and 268-274 (e.g., SEQ ID NOS:66, 68, 94, 107-109, 119, and 268-270). In some embodiments, a modified Fc polypeptide having the sequence of any one of SEQ ID NOS:4-29, 64-127, and 268-274 (e.g., SEQ ID NOS:66, 68, 94, 107-109, 119, and 268-270) may be modified to have a knob mutation, mutations that modulate effector function, and mutations that increase serum stability or serum half-life.

[0204] In some embodiments, a modified Fc polypeptide as described herein (e.g., any one of clones CH3C.35.20.1, CH3C.35.23.2, CH3C.35.23.3, CH3C.35.23.4, CH3C.35.21.17.2, CH3C.35.23, CH3C.35.21, CH3C.35.20.1.1, CH3C.35.23.2.1, and CH3C.35.23.1.1) may have hole mutations (e.g., T136S, L138A, and Y177V as numbered with reference to SEQ ID NO:1) and at least 85% identity, at least 90% identity, or at least 95% identity to the sequence of any one of SEQ ID NOS:4-29, 64-127, and 268-274 (e.g., SEQ ID NOS:66, 68, 94, 107-109, 119, and 268-270). In some embodiments, a modified Fc polypeptide having the sequence of any one of SEQ ID NOS:4-29, 64-127, and 268-274 (e.g., SEQ ID NOS:66, 68, 94, 107-109, 119, and 268-270) may be modified to have hole mutations.

[0205] In some embodiments, a modified Fc polypeptide as described herein (e.g., any one of clones CH3C.35.20.1, CH3C.35.23.2, CH3C.35.23.3, CH3C.35.23.4, CH3C.35.21.17.2, CH3C.35.23, CH3C.35.21, CH3C.35.20.1.1, CH3C.35.23.2.1, and CH3C.35.23.1.1) may have hole mutations (e.g., T136S, L138A, and Y177V as numbered with reference to SEQ ID NO:1), mutations that modulate effector function (e.g., L4A, L5A, and/or P99G (e.g., L4A and L5A) as numbered with reference to SEQ ID NO:1), and at least 85% identity, at least 90% identity, or at least 95% identity to the sequence of any one of SEQ ID NOS:4-29, 64-127, and 268-274 (e.g., SEQ ID NOS:66, 68, 94, 107-109, 119, and 268-270). In some embodiments, a modified Fc polypeptide having the sequence of any one of SEQ ID NOS:4-29, 64-127, and 268-274 (e.g., SEQ ID NOS:66, 68, 94, 107-109, 119, and 268-270) may be modified to have hole mutations and mutations that modulate effector function.

[0206] In some embodiments, a modified Fc polypeptide as described herein (e.g., any one of clones CH3C.35.20.1, CH3C.35.23.2, CH3C.35.23.3, CH3C.35.23.4, CH3C.35.21.17.2, CH3C.35.23, CH3C.35.21, CH3C.35.20.1.1, CH3C.35.23.2.1, and CH3C.35.23.1.1) may have hole mutations (e.g., T136S, L138A, and Y177V as numbered with reference to SEQ ID NO:1), mutations that increase serum stability or serum half-life (e.g., (i) M22Y, S24T, and T26E as numbered with reference to SEQ ID NO:1, or (ii) N204S with or without M198L as numbered with reference to SEQ ID NO:1), and at least 85% identity, at least 90% identity, or at least 95% identity to the sequence of any one of SEQ ID NOS:4-29, 64-127, and 268-274 (e.g., SEQ ID NOS:66, 68, 94, 107-109, 119, and 268-270). In some embodiments, a modified Fc polypeptide having the sequence of any one of SEQ ID NOS:4-29, 64-127, and 268-274 (e.g., SEQ ID NOS:66, 68, 94, 107-109, 119, and 268-270) may be modified to have hole mutations and mutations that increase serum stability or serum half-life.

[0207] In some embodiments, a modified Fc polypeptide as described herein (e.g., any one of clones CH3C.35.20.1, CH3C.35.23.2, CH3C.35.23.3, CH3C.35.23.4, CH3C.35.21.17.2, CH3C.35.23, CH3C.35.21, CH3C.35.20.1.1, CH3C.35.23.2.1, and CH3C.35.23.1.1) may have hole mutations (e.g., T136S, L138A, and Y177V as numbered with reference to SEQ ID NO:1), mutations that modulate effector function (e.g., L4A, L5A, and/or P99G (e.g., L4A and L5A) as numbered with reference to SEQ ID NO:1), mutations that increase serum stability or serum half-life (e.g., (i) M22Y, S24T, and T26E as numbered with reference to SEQ ID NO:1, or (ii) N204S with or without M198L as numbered with reference to SEQ ID NO:1), and at least 85% identity, at least 90% identity, or at least 95% identity to the sequence of any one of SEQ ID NOS:4-29, 64-127, and 268-274 (e.g., SEQ ID NOS:66, 68, 94, 107-109, 119, and 268-270). In some embodiments, a modified Fc polypeptide having the sequence of any one of SEQ ID NOS:4-29, 64-127, and 268-274 (e.g., SEQ ID NOS:66, 68, 94, 107-109, 119, and 268-270) may be modified to have hole mutations, mutations that modulate effector function, and mutations that increase serum stability or serum half-life.

[0208] Clone CH3C.35.20.1

[0209] In some embodiments, clone CH3C.35.20.1 may have a knob mutation (e.g., T136W as numbered with reference to SEQ ID NO:1) and at least 85% identity, at least 90% identity, or at least 95% identity to the sequence of SEQ ID NO:177. In some embodiments, clone CH3C.35.20.1 with the knob mutation has the sequence of SEQ ID NO:177.

[0210] In some embodiments, clone CH3C.35.20.1 may have a knob mutation (e.g., T136W as numbered with reference to SEQ ID NO:1), mutations that modulate effector function (e.g., L4A, L5A, and/or P99G (e.g., L4A and L5A) as numbered with reference to SEQ ID NO:1), and at least 85% identity, at least 90% identity, or at least 95% identity to the sequence of SEQ ID NO:178 or 179. In some embodiments, clone CH3C.35.20.1 with the knob mutation and the mutations that modulate effector function has the sequence of SEQ ID NO:178 or 179.

[0211] In some embodiments, clone CH3C.35.20.1 may have a knob mutation (e.g., T136W as numbered with reference to SEQ ID NO:1), mutations that increase serum stability or serum half-life (e.g., M22Y, S24T, and T26E as numbered with reference to SEQ ID NO:1), and at least 85% identity, at least 90% identity, or at least 95% identity to the sequence of SEQ ID NO:180. In some embodiments, clone CH3C.35.20.1 with the knob mutation and the mutations that increase serum stability or serum half-life has the sequence of SEQ ID NO:180.

[0212] In some embodiments, clone CH3C.35.20.1 may have a knob mutation (e.g., T136W as numbered with reference to SEQ ID NO:1), mutations that increase serum stability or serum half-life (e.g., N204S with or without M198L as numbered with reference to SEQ ID NO:1), and at least 85% identity, at least 90% identity, or at least 95% identity to the sequence of SEQ ID NO:322. In some embodiments, clone CH3C.35.20.1 with the knob mutation and the mutations that increase serum stability or serum half-life has the sequence of SEQ ID NO:322.

[0213] In some embodiments, clone CH3C.35.20.1 may have a knob mutation (e.g., T136W as numbered with reference to SEQ ID NO:1), mutations that modulate effector function (e.g., L4A, L5A, and/or P99G (e.g., L4A and L5A) as numbered with reference to SEQ ID NO:1), mutations that increase serum stability or serum half-life (e.g., M22Y, S24T, and T26E as numbered with reference to SEQ ID NO:1), and at least 85% identity, at least 90% identity, or at least 95% identity to the sequence of SEQ ID NO:181 or 182. In some embodiments, clone CH3C.35.20.1 with the knob mutation, the mutations that modulate effector function, and the mutations that increase serum stability or serum half-life has the sequence of SEQ ID NO:181 or 182.

[0214] In some embodiments, clone CH3C.35.20.1 may have a knob mutation (e.g., T136W as numbered with reference to SEQ ID NO:1), mutations that modulate effector function (e.g., L4A, L5A, and/or P99G (e.g., L4A and L5A) as numbered with reference to SEQ ID NO:1), mutations that increase serum stability or serum half-life (e.g., N204S with or without M198L as numbered with reference to SEQ ID NO:1), and at least 85% identity, at least 90% identity, or at least 95% identity to the sequence of SEQ ID NO:323 or 324. In some embodiments, clone CH3C.35.20.1 with the knob mutation, the mutations that modulate effector function, and the mutations that increase serum stability or serum half-life has the sequence of SEQ ID NO:323 or 324.

[0215] In some embodiments, clone CH3C.35.20.1 may have hole mutations (e.g., T136S, L138A, and Y177V as numbered with reference to SEQ ID NO:1) and at least 85% identity, at least 90% identity, or at least 95% identity to the sequence of SEQ ID NO:183. In some embodiments, clone CH3C.35.20.1 with the hole mutations has the sequence of SEQ ID NO:183.

[0216] In some embodiments, clone CH3C.35.20.1 may have hole mutations (e.g., T136S, L138A, and Y177V as numbered with reference to SEQ ID NO:1), mutations that modulate effector function (e.g., L4A, L5A, and/or P99G (e.g., L4A and L5A) as numbered with reference to SEQ ID NO:1), and at least 85% identity, at least 90% identity, or at least 95% identity to the sequence of SEQ ID NO:184 or 185. In some embodiments, clone CH3C.35.20.1 with the hole mutations and the mutations that modulate effector function has the sequence of SEQ ID NO:184 or 185.

[0217] In some embodiments, clone CH3C.35.20.1 may have hole mutations (e.g., T136S, L138A, and Y177V as numbered with reference to SEQ ID NO:1), mutations that increase serum stability or serum half-life (e.g., M22Y, S24T, and T26E as numbered with reference to SEQ ID NO:1), and at least 85% identity, at least 90% identity, or at least 95% identity to the sequence of SEQ ID NO:186. In some embodiments, clone CH3C.35.20.1 with the hole mutations and the mutations that increase serum stability or serum half-life has the sequence of SEQ ID NO:186.

[0218] In some embodiments, clone CH3C.35.20.1 may have hole mutations (e.g., T136S, L138A, and Y177V as numbered with reference to SEQ ID NO:1), mutations that increase serum stability or serum half-life (e.g., N204S with or without M198L as numbered with reference to SEQ ID NO:1), and at least 85% identity, at least 90% identity, or at least 95% identity to the sequence of SEQ ID NO:325. In some embodiments, clone CH3C.35.20.1 with the hole mutations and the mutations that increase serum stability or serum half-life has the sequence of SEQ ID NO:325.

[0219] In some embodiments, clone CH3C.35.20.1 may have hole mutations (e.g., T136S, L138A, and Y177V as numbered with reference to SEQ ID NO:1), mutations that modulate effector function (e.g., L4A, L5A, and/or P99G (e.g., L4A and L5A) as numbered with reference to SEQ ID NO:1), mutations that increase serum stability or serum half-life (e.g., M22Y, S24T, and T26E as numbered with reference to SEQ ID NO:1), and at least 85% identity, at least 90% identity, or at least 95% identity to the sequence of SEQ ID NO:187 or 188. In some embodiments, clone CH3C.35.20.1 with the hole mutations, the mutations that modulate effector function, and the mutations that increase serum stability or serum half-life has the sequence of SEQ ID NO:187 or 188.

[0220] In some embodiments, clone CH3C.35.20.1 may have hole mutations (e.g., T136S, L138A, and Y177V as numbered with reference to SEQ ID NO:1), mutations that modulate effector function (e.g., L4A, L5A, and/or P99G (e.g., L4A and L5A) as numbered with reference to SEQ ID NO:1), mutations that increase serum stability or serum half-life (e.g., N204S with or without M198L as numbered with reference to SEQ ID NO:1), and at least 85% identity, at least 90% identity, or at least 95% identity to the sequence of SEQ ID NO:326 or 327. In some embodiments, clone CH3C.35.20.1 with the hole mutations, the mutations that modulate effector function, and the mutations that increase serum stability or serum half-life has the sequence of SEQ ID NO:326 or 327.

[0221] Clone CH3C.35.23.2

[0222] In some embodiments, clone CH3C.35.23.2 may have a knob mutation (e.g., T136W as numbered with reference to SEQ ID NO:1) and at least 85% identity, at least 90% identity, or at least 95% identity to the sequence of SEQ ID NO:189. In some embodiments, clone CH3C.35.23.2 with the knob mutation has the sequence of SEQ ID NO:189.

[0223] In some embodiments, clone CH3C.35.23.2 may have a knob mutation (e.g., T136W as numbered with reference to SEQ ID NO:1), mutations that modulate effector function (e.g., L4A, L5A, and/or P99G (e.g., L4A and L5A) as numbered with reference to SEQ ID NO:1), and at least 85% identity, at least 90% identity, or at least 95% identity to the sequence of SEQ ID NO:190 or 191. In some embodiments, clone CH3C.35.23.2 with the knob mutation and the mutations that modulate effector function has the sequence of SEQ ID NO:190 or 191.

[0224] In some embodiments, clone CH3C.35.23.2 may have a knob mutation (e.g., T136W as numbered with reference to SEQ ID NO:1), mutations that increase serum stability or serum half-life (e.g., M22Y, S24T, and T26E as numbered with reference to SEQ ID NO:1), and at least 85% identity, at least 90% identity, or at least 95% identity to the sequence of SEQ ID NO:192. In some embodiments, clone CH3C.35.23.2 with the knob mutation and the mutations that increase serum stability or serum half-life has the sequence of SEQ ID NO:192.

[0225] In some embodiments, clone CH3C.35.23.2 may have a knob mutation (e.g., T136W as numbered with reference to SEQ ID NO:1), mutations that increase serum stability or serum half-life (e.g., N204S with or without M198L as numbered with reference to SEQ ID NO:1), and at least 85% identity, at least 90% identity, or at least 95% identity to the sequence of SEQ ID NO:329. In some embodiments, clone CH3C.35.23.2 with the knob mutation and the mutations that increase serum stability or serum half-life has the sequence of SEQ ID NO:329.

[0226] In some embodiments, clone CH3C.35.23.2 may have a knob mutation (e.g., T136W as numbered with reference to SEQ ID NO:1), mutations that modulate effector function (e.g., L4A, L5A, and/or P99G (e.g., L4A and L5A) as numbered with reference to SEQ ID NO:1), mutations that increase serum stability or serum half-life (e.g., M22Y, S24T, and T26E as numbered with reference to SEQ ID NO:1), and at least 85% identity, at least 90% identity, or at least 95% identity to the sequence of SEQ ID NO:193 or 194. In some embodiments, clone CH3C.35.23.2 with the knob mutation, the mutations that modulate effector function, and the mutations that increase serum stability or serum half-life has the sequence of SEQ ID NO:193 or 194.

[0227] In some embodiments, clone CH3C.35.23.2 may have a knob mutation (e.g., T136W as numbered with reference to SEQ ID NO:1), mutations that modulate effector function (e.g., L4A, L5A, and/or P99G (e.g., L4A and L5A) as numbered with reference to SEQ ID NO:1), mutations that increase serum stability or serum half-life (e.g., N204S with or without M198L as numbered with reference to SEQ ID NO:1), and at least 85% identity, at least 90% identity, or at least 95% identity to the sequence of SEQ ID NO:330 or 331. In some embodiments, clone CH3C.35.23.2 with the knob mutation, the mutations that modulate effector function, and the mutations that increase serum stability or serum half-life has the sequence of SEQ ID NO:330 or 331.

[0228] In some embodiments, clone CH3C.35.23.2 may have hole mutations (e.g., T136S, L138A, and Y177V as numbered with reference to SEQ ID NO:1) and at least 85% identity, at least 90% identity, or at least 95% identity to the sequence of SEQ ID NO:195. In some embodiments, clone CH3C.35.23.2 with the hole mutations has the sequence of SEQ ID NO:195.

[0229] In some embodiments, clone CH3C.35.23.2 may have hole mutations (e.g., T136S, L138A, and Y177V as numbered with reference to SEQ ID NO:1), mutations that modulate effector function (e.g., L4A, L5A, and/or P99G (e.g., L4A and L5A) as numbered with reference to SEQ ID NO:1), and at least 85% identity, at least 90% identity, or at least 95% identity to the sequence of SEQ ID NO:196 or 197. In some embodiments, clone CH3C.35.23.2 with the hole mutations and the mutations that modulate effector function has the sequence of SEQ ID NO:196 or 197.

[0230] In some embodiments, clone CH3C.35.23.2 may have hole mutations (e.g., T136S, L138A, and Y177V as numbered with reference to SEQ ID NO:1), mutations that increase serum stability or serum half-life (e.g., M22Y, S24T, and T26E as numbered with reference to SEQ ID NO:1), and at least 85% identity, at least 90% identity, or at least 95% identity to the sequence of SEQ ID NO:198. In some embodiments, clone CH3C.35.23.2 with the hole mutations and the mutations that increase serum stability or serum half-life has the sequence of SEQ ID NO:198.

[0231] In some embodiments, clone CH3C.35.23.2 may have hole mutations (e.g., T136S, L138A, and Y177V as numbered with reference to SEQ ID NO:1), mutations that increase serum stability or serum half-life (e.g., N204S with or without M198L as numbered with reference to SEQ ID NO:1), and at least 85% identity, at least 90% identity, or at least 95% identity to the sequence of SEQ ID NO:332. In some embodiments, clone CH3C.35.23.2 with the hole mutations and the mutations that increase serum stability or serum half-life has the sequence of SEQ ID NO:332.

[0232] In some embodiments, clone CH3C.35.23.2 may have hole mutations (e.g., T136S, L138A, and Y177V as numbered with reference to SEQ ID NO:1), mutations that modulate effector function (e.g., L4A, L5A, and/or P99G (e.g., L4A and L5A) as numbered with reference to SEQ ID NO:1), mutations that increase serum stability or serum half-life (e.g., M22Y, S24T, and T26E as numbered with reference to SEQ ID NO:1), and at least 85% identity, at least 90% identity, or at least 95% identity to the sequence of SEQ ID NO:199 or 200. In some embodiments, clone CH3C.35.23.2 with the hole mutations, the mutations that modulate effector function, and the mutations that increase serum stability or serum half-life has the sequence of SEQ ID NO:199 or 200.

[0233] In some embodiments, clone CH3C.35.23.2 may have hole mutations (e.g., T136S, L138A, and Y177V as numbered with reference to SEQ ID NO:1), mutations that modulate effector function (e.g., L4A, L5A, and/or P99G (e.g., L4A and L5A) as numbered with reference to SEQ ID NO:1), mutations that increase serum stability or serum half-life (e.g., N204S with or without M198L as numbered with reference to SEQ ID NO:1), and at least 85% identity, at least 90% identity, or at least 95% identity to the sequence of SEQ ID NO:333 or 334. In some embodiments, clone CH3C.35.23.2 with the hole mutations, the mutations that modulate effector function, and the mutations that increase serum stability or serum half-life has the sequence of SEQ ID NO:333 or 334.

[0234] Clone CH3C.35.23.3

[0235] In some embodiments, clone CH3C.35.23.3 may have a knob mutation (e.g., T136W as numbered with reference to SEQ ID NO:1) and at least 85% identity, at least 90% identity, or at least 95% identity to the sequence of SEQ ID NO:201. In some embodiments, clone CH3C.35.23.3 with the knob mutation has the sequence of SEQ ID NO:201.

[0236] In some embodiments, clone CH3C.35.23.3 may have a knob mutation (e.g., T136W as numbered with reference to SEQ ID NO:1), mutations that modulate effector function (e.g., L4A, L5A, and/or P99G (e.g., L4A and L5A) as numbered with reference to SEQ ID NO:1), and at least 85% identity, at least 90% identity, or at least 95% identity to the sequence of SEQ ID NO:202 or 203. In some embodiments, clone CH3C.35.23.3 with the knob mutation and the mutations that modulate effector function has the sequence of SEQ ID NO:202 or 203.

[0237] In some embodiments, clone CH3C.35.23.3 may have a knob mutation (e.g., T136W as numbered with reference to SEQ ID NO:1), mutations that increase serum stability or serum half-life (e.g., M22Y, S24T, and T26E as numbered with reference to SEQ ID NO:1), and at least 85% identity, at least 90% identity, or at least 95% identity to the sequence of SEQ ID NO:204. In some embodiments, clone CH3C.35.23.3 with the knob mutation and the mutations that increase serum stability or serum half-life has the sequence of SEQ ID NO:204.

[0238] In some embodiments, clone CH3C.35.23.3 may have a knob mutation (e.g., T136W as numbered with reference to SEQ ID NO:1), mutations that increase serum stability or serum half-life (e.g., N204S with or without M198L as numbered with reference to SEQ ID NO:1), and at least 85% identity, at least 90% identity, or at least 95% identity to the sequence of SEQ ID NO:336. In some embodiments, clone CH3C.35.23.3 with the knob mutation and the mutations that increase serum stability or serum half-life has the sequence of SEQ ID NO:336.

[0239] In some embodiments, clone CH3C.35.23.3 may have a knob mutation (e.g., T136W as numbered with reference to SEQ ID NO:1), mutations that modulate effector function (e.g., L4A, L5A, and/or P99G (e.g., L4A and L5A) as numbered with reference to SEQ ID NO:1), mutations that increase serum stability or serum half-life (e.g., M22Y, S24T, and T26E as numbered with reference to SEQ ID NO:1), and at least 85% identity, at least 90% identity, or at least 95% identity to the sequence of SEQ ID NO:205 or 206. In some embodiments, clone CH3C.35.23.3 with the knob mutation, the mutations that modulate effector function, and the mutations that increase serum stability or serum half-life has the sequence of SEQ ID NO:205 or 206.

[0240] In some embodiments, clone CH3C.35.23.3 may have a knob mutation (e.g., T136W as numbered with reference to SEQ ID NO:1), mutations that modulate effector function (e.g., L4A, L5A, and/or P99G (e.g., L4A and L5A) as numbered with reference to SEQ ID NO:1), mutations that increase serum stability or serum half-life (e.g., N204S with or without M198L as numbered with reference to SEQ ID NO:1), and at least 85% identity, at least 90% identity, or at least 95% identity to the sequence of SEQ ID NO:337 or 338. In some embodiments, clone CH3C.35.23.3 with the knob mutation, the mutations that modulate effector function, and the mutations that increase serum stability or serum half-life has the sequence of SEQ ID NO:337 or 338.

[0241] In some embodiments, clone CH3C.35.23.3 may have hole mutations (e.g., T136S, L138A, and Y177V as numbered with reference to SEQ ID NO:1) and at least 85% identity, at least 90% identity, or at least 95% identity to the sequence of SEQ ID NO:207. In some embodiments, clone CH3C.35.23.3 with the hole mutations and the sequence of SEQ ID NO:207.

[0242] In some embodiments, clone CH3C.35.23.3 may have hole mutations (e.g., T136S, L138A, and Y177V as numbered with reference to SEQ ID NO:1), mutations that modulate effector function (e.g., L4A, L5A, and/or P99G (e.g., L4A and L5A) as numbered with reference to SEQ ID NO:1), and at least 85% identity, at least 90% identity, or at least 95% identity to the sequence of SEQ ID NO:208 or 209. In some embodiments, clone CH3C.35.23.3 with the hole mutations and the mutations that modulate effector function has the sequence of SEQ ID NO:208 or 209.

[0243] In some embodiments, clone CH3C.35.23.3 may have hole mutations (e.g., T136S, L138A, and Y177V as numbered with reference to SEQ ID NO:1), mutations that increase serum stability or serum half-life (e.g., M22Y, S24T, and T26E as numbered with reference to SEQ ID NO:1), and at least 85% identity, at least 90% identity, or at least 95% identity to the sequence of SEQ ID NO:210. In some embodiments, clone CH3C.35.23.3 with the hole mutations and the mutations that increase serum stability or serum half-life has the sequence of SEQ ID NO:210.

[0244] In some embodiments, clone CH3C.35.23.3 may have hole mutations (e.g., T136S, L138A, and Y177V as numbered with reference to SEQ ID NO:1), mutations that increase serum stability or serum half-life (e.g., N204S with or without M198L as numbered with reference to SEQ ID NO:1), and at least 85% identity, at least 90% identity, or at least 95% identity to the sequence of SEQ ID NO:339. In some embodiments, clone CH3C.35.23.3 with the hole mutations and the mutations that increase serum stability or serum half-life has the sequence of SEQ ID NO:339.

[0245] In some embodiments, clone CH3C.35.23.3 may have hole mutations (e.g., T136S, L138A, and Y177V as numbered with reference to SEQ ID NO:1), mutations that modulate effector function (e.g., L4A, L5A, and/or P99G (e.g., L4A and L5A) as numbered with reference to SEQ ID NO:1), mutations that increase serum stability or serum half-life (e.g., M22Y, S24T, and T26E as numbered with reference to SEQ ID NO:1), and at least 85% identity, at least 90% identity, or at least 95% identity to the sequence of SEQ ID NO:211 or 212. In some embodiments, clone CH3C.35.23.3 with the hole mutations, the mutations that modulate effector function, and the mutations that increase serum stability or serum half-life has the sequence of SEQ ID NO:211 or 212.

[0246] In some embodiments, clone CH3C.35.23.3 may have hole mutations (e.g., T136S, L138A, and Y177V as numbered with reference to SEQ ID NO:1), mutations that modulate effector function (e.g., L4A, L5A, and/or P99G (e.g., L4A and L5A) as numbered with reference to SEQ ID NO:1), mutations that increase serum stability or serum half-life (e.g., N204S with or without M198L as numbered with reference to SEQ ID NO:1), and at least 85% identity, at least 90% identity, or at least 95% identity to the sequence of SEQ ID NO:340 or 341. In some embodiments, clone CH3C.35.23.3 with the hole mutations, the mutations that modulate effector function, and the mutations that increase serum stability or serum half-life has the sequence of SEQ ID NO:340 or 341.

[0247] Clone CH3C. 35.23.4

[0248] In some embodiments, clone CH3C.35.23.4 may have a knob mutation (e.g., T136W as numbered with reference to SEQ ID NO:1) and at least 85% identity, at least 90% identity, or at least 95% identity to the sequence of SEQ ID NO:213. In some embodiments, clone CH3C.35.23.4 with the knob mutation has the sequence of SEQ ID NO:213.

[0249] In some embodiments, clone CH3C.35.23.4 may have a knob mutation (e.g., T136W as numbered with reference to SEQ ID NO:1), mutations that modulate effector function (e.g., L4A, L5A, and/or P99G (e.g., L4A and L5A) as numbered with reference to SEQ ID NO:1), and at least 85% identity, at least 90% identity, or at least 95% identity to the sequence of SEQ ID NO:214 or 215. In some embodiments, clone CH3C.35.23.4 with the knob mutation and the mutations that modulate effector function has the sequence of SEQ ID NO:214 or 215.

[0250] In some embodiments, clone CH3C.35.23.4 may have a knob mutation (e.g., T136W as numbered with reference to SEQ ID NO:1), mutations that increase serum stability or serum half-life (e.g., M22Y, S24T, and T26E as numbered with reference to SEQ ID NO:1), and at least 85% identity, at least 90% identity, or at least 95% identity to the sequence of SEQ ID NO:216. In some embodiments, clone CH3C.35.23.4 with the knob mutation and the mutations that increase serum stability or serum half-life has the sequence of SEQ ID NO:216.

[0251] In some embodiments, clone CH3C.35.23.4 may have a knob mutation (e.g., T136W as numbered with reference to SEQ ID NO:1), mutations that increase serum stability or serum half-life (e.g., N204S with or without M198L as numbered with reference to SEQ ID NO:1), and at least 85% identity, at least 90% identity, or at least 95% identity to the sequence of SEQ ID NO:343. In some embodiments, clone CH3C.35.23.4 with the knob mutation and the mutations that increase serum stability or serum half-life has the sequence of SEQ ID NO:343.

[0252] In some embodiments, clone CH3C.35.23.4 may have a knob mutation (e.g., T136W as numbered with reference to SEQ ID NO:1), mutations that modulate effector function (e.g., L4A, L5A, and/or P99G (e.g., L4A and L5A) as numbered with reference to SEQ ID NO:1), mutations that increase serum stability or serum half-life (e.g., M22Y, S24T, and T26E as numbered with reference to SEQ ID NO:1), and at least 85% identity, at least 90% identity, or at least 95% identity to the sequence of SEQ ID NO:217 or 218. In some embodiments, clone CH3C.35.23.4 with the knob mutation, the mutations that modulate effector function, and the mutations that increase serum stability or serum half-life has the sequence of SEQ ID NO:217 or 218.

[0253] In some embodiments, clone CH3C.35.23.4 may have a knob mutation (e.g., T136W as numbered with reference to SEQ ID NO:1), mutations that modulate effector function (e.g., L4A, L5A, and/or P99G (e.g., L4A and L5A) as numbered with reference to SEQ ID NO:1), mutations that increase serum stability or serum half-life (e.g., N204S with or without M198L as numbered with reference to SEQ ID NO:1), and at least 85% identity, at least 90% identity, or at least 95% identity to the sequence of SEQ ID NO:344 or 345. In some embodiments, clone CH3C.35.23.4 with the knob mutation, the mutations that modulate effector function, and the mutations that increase serum stability or serum half-life has the sequence of SEQ ID NO:344 or 345.

[0254] In some embodiments, clone CH3C.35.23.4 may have hole mutations (e.g., T136S, L138A, and Y177V as numbered with reference to SEQ ID NO:1) and at least 85% identity, at least 90% identity, or at least 95% identity to the sequence of SEQ ID NO:219. In some embodiments, clone CH3C.35.23.4 with the hole mutations has the sequence of SEQ ID NO:219.

[0255] In some embodiments, clone CH3C.35.23.4 may have hole mutations (e.g., T136S, L138A, and Y177V as numbered with reference to SEQ ID NO:1), mutations that modulate effector function (e.g., L4A, L5A, and/or P99G (e.g., L4A and L5A) as numbered with reference to SEQ ID NO:1), and at least 85% identity, at least 90% identity, or at least 95% identity to the sequence of SEQ ID NO:220 or 221. In some embodiments, clone CH3C.35.23.4 with the hole mutations and the mutations that modulate effector function has the sequence of SEQ ID NO:220 or 221.

[0256] In some embodiments, clone CH3C.35.23.4 may have hole mutations (e.g., T136S, L138A, and Y177V as numbered with reference to SEQ ID NO:1), mutations that increase serum stability or serum half-life (e.g., M22Y, S24T, and T26E as numbered with reference to SEQ ID NO:1), and at least 85% identity, at least 90% identity, or at least 95% identity to the sequence of SEQ ID NO:222. In some embodiments, clone CH3C.35.23.4 with the hole mutations and the mutations that increase serum stability or serum half-life has the sequence of SEQ ID NO:222.

[0257] In some embodiments, clone CH3C.35.23.4 may have hole mutations (e.g., T136S, L138A, and Y177V as numbered with reference to SEQ ID NO:1), mutations that increase serum stability or serum half-life (e.g., N204S with or without M198L as numbered with reference to SEQ ID NO:1), and at least 85% identity, at least 90% identity, or at least 95% identity to the sequence of SEQ ID NO:346. In some embodiments, clone CH3C.35.23.4 with the hole mutations and the mutations that increase serum stability or serum half-life has the sequence of SEQ ID NO:346.

[0258] In some embodiments, clone CH3C.35.23.4 may have hole mutations (e.g., T136S, L138A, and Y177V as numbered with reference to SEQ ID NO:1), mutations that modulate effector function (e.g., L4A, L5A, and/or P99G (e.g., L4A and L5A) as numbered with reference to SEQ ID NO:1), mutations that increase serum stability or serum half-life (e.g., M22Y, S24T, and T26E as numbered with reference to SEQ ID NO:1), and at least 85% identity, at least 90% identity, or at least 95% identity to the sequence of SEQ ID NO:223 or 224. In some embodiments, clone CH3C.35.23.4 with the hole mutations, the mutations that modulate effector function, and the mutations that increase serum stability or serum half-life has the sequence of SEQ ID NO:223 or 224.

[0259] In some embodiments, clone CH3C.35.23.4 may have hole mutations (e.g., T136S, L138A, and Y177V as numbered with reference to SEQ ID NO:1), mutations that modulate effector function (e.g., L4A, L5A, and/or P99G (e.g., L4A and L5A) as numbered with reference to SEQ ID NO:1), mutations that increase serum stability or serum half-life (e.g., N204S with or without M198L as numbered with reference to SEQ ID NO:1), and at least 85% identity, at least 90% identity, or at least 95% identity to the sequence of SEQ ID NO:347 or 348. In some embodiments, clone CH3C.35.23.4 with the hole mutations, the mutations that modulate effector function, and the mutations that increase serum stability or serum half-life has the sequence of SEQ ID NO:347 or 348.

[0260] Clone CH3C.35.21.17.2

[0261] In some embodiments, clone CH3C.35.21.17.2 may have a knob mutation (e.g., T136W as numbered with reference to SEQ ID NO:1) and at least 85% identity, at least 90% identity, or at least 95% identity to the sequence of SEQ ID NO:225. In some embodiments, clone CH3C.35.21.17.2 with the knob mutation has the sequence of SEQ ID NO:225.

[0262] In some embodiments, clone CH3C.35.21.17.2 may have a knob mutation (e.g., T136W as numbered with reference to SEQ ID NO:1), mutations that modulate effector function (e.g., L4A, L5A, and/or P99G (e.g., L4A and L5A) as numbered with reference to SEQ ID NO:1), and at least 85% identity, at least 90% identity, or at least 95% identity to the sequence of SEQ ID NO:226 or 227. In some embodiments, clone CH3C.35.21.17.2 with the knob mutation and the mutations that modulate effector function has the sequence of SEQ ID NO:226 or 227.

[0263] In some embodiments, clone CH3C.35.21.17.2 may have a knob mutation (e.g., T136W as numbered with reference to SEQ ID NO:1), mutations that increase serum stability or serum half-life (e.g., M22Y, S24T, and T26E as numbered with reference to SEQ ID NO:1), and at least 85% identity, at least 90% identity, or at least 95% identity to the sequence of SEQ ID NO:228. In some embodiments, clone CH3C.35.21.17.2 with the knob mutation and the mutations that increase serum stability or serum half-life has the sequence of SEQ ID NO:228.

[0264] In some embodiments, clone CH3C.35.21.17.2 may have a knob mutation (e.g., T136W as numbered with reference to SEQ ID NO:1), mutations that increase serum stability or serum half-life (e.g., N204S with or without M198L as numbered with reference to SEQ ID NO:1), and at least 85% identity, at least 90% identity, or at least 95% identity to the sequence of SEQ ID NO:350. In some embodiments, clone CH3C.35.21.17.2 with the knob mutation and the mutations that increase serum stability or serum half-life has the sequence of SEQ ID NO:350.

[0265] In some embodiments, clone CH3C.35.21.17.2 may have a knob mutation (e.g., T136W as numbered with reference to SEQ ID NO:1), mutations that modulate effector function (e.g., L4A, L5A, and/or P99G (e.g., L4A and L5A) as numbered with reference to SEQ ID NO:1), mutations that increase serum stability or serum half-life (e.g., M22Y, S24T, and T26E as numbered with reference to SEQ ID NO:1), and at least 85% identity, at least 90% identity, or at least 95% identity to the sequence of SEQ ID NO:229 or 230. In some embodiments, clone CH3C.35.21.17.2 with the knob mutation, the mutations that modulate effector function, and the mutations that increase serum stability or serum half-life has the sequence of SEQ ID NO:229 or 230.

[0266] In some embodiments, clone CH3C.35.21.17.2 may have a knob mutation (e.g., T136W as numbered with reference to SEQ ID NO:1), mutations that modulate effector function (e.g., L4A, L5A, and/or P99G (e.g., L4A and L5A) as numbered with reference to SEQ ID NO:1), mutations that increase serum stability or serum half-life (e.g., N204S with or without M198L as numbered with reference to SEQ ID NO:1), and at least 85% identity, at least 90% identity, or at least 95% identity to the sequence of SEQ ID NO:351 or 352. In some embodiments, clone CH3C.35.21.17.2 with the knob mutation, the mutations that modulate effector function, and the mutations that increase serum stability or serum half-life has the sequence of SEQ ID NO:351 or 352.

[0267] In some embodiments, clone CH3C.35.21.17.2 may have hole mutations (e.g., T136S, L138A, and Y177V as numbered with reference to SEQ ID NO:1) and at least 85% identity, at least 90% identity, or at least 95% identity to the sequence of SEQ ID NO:231. In some embodiments, clone CH3C.35.21.17.2 with the hole mutations has the sequence of SEQ ID NO:231.

[0268] In some embodiments, clone CH3C.35.21.17.2 may have hole mutations (e.g., T136S, L138A, and Y177V as numbered with reference to SEQ ID NO:1), mutations that modulate effector function (e.g., L4A, L5A, and/or P99G (e.g., L4A and L5A) as numbered with reference to SEQ ID NO:1), and at least 85% identity, at least 90% identity, or at least 95% identity to the sequence of SEQ ID NO:232 or 233. In some embodiments, clone CH3C.35.21.17.2 with the hole mutations and the mutations that modulate effector function has the sequence of SEQ ID NO:232 or 233.

[0269] In some embodiments, clone CH3C.35.21.17.2 may have hole mutations (e.g., T136S, L138A, and Y177V as numbered with reference to SEQ ID NO:1), mutations that increase serum stability or serum half-life (e.g., M22Y, S24T, and T26E as numbered with reference to SEQ ID NO:1), and at least 85% identity, at least 90% identity, or at least 95% identity to the sequence of SEQ ID NO:234. In some embodiments, clone CH3C.35.21.17.2 with the hole mutations and the mutations that increase serum stability or serum half-life has the sequence of SEQ ID NO:234.

[0270] In some embodiments, clone CH3C.35.21.17.2 may have hole mutations (e.g., T136S, L138A, and Y177V as numbered with reference to SEQ ID NO:1), mutations that increase serum stability or serum half-life (e.g., N204S with or without M198L as numbered with reference to SEQ ID NO:1), and at least 85% identity, at least 90% identity, or at least 95% identity to the sequence of SEQ ID NO:353. In some embodiments, clone CH3C.35.21.17.2 with the hole mutations and the mutations that increase serum stability or serum half-life has the sequence of SEQ ID NO:353.

[0271] In some embodiments, clone CH3C.35.21.17.2 may have hole mutations (e.g., T136S, L138A, and Y177V as numbered with reference to SEQ ID NO:1), mutations that modulate effector function (e.g., L4A, L5A, and/or P99G (e.g., L4A and L5A) as numbered with reference to SEQ ID NO:1), mutations that increase serum stability or serum half-life (e.g., M22Y, S24T, and T26E as numbered with reference to SEQ ID NO:1), and at least 85% identity, at least 90% identity, or at least 95% identity to the sequence of SEQ ID NO:235 or 236. In some embodiments, clone CH3C.35.21.17.2 with the hole mutations, the mutations that modulate effector function, and the mutations that increase serum stability or serum half-life has the sequence of SEQ ID NO:235 or 236.

[0272] In some embodiments, clone CH3C.35.21.17.2 may have hole mutations (e.g., T136S, L138A, and Y177V as numbered with reference to SEQ ID NO:1), mutations that modulate effector function (e.g., L4A, L5A, and/or P99G (e.g., L4A and L5A) as numbered with reference to SEQ ID NO:1), mutations that increase serum stability or serum half-life (e.g., N204S with or without M198L as numbered with reference to SEQ ID NO:1), and at least 85% identity, at least 90% identity, or at least 95% identity to the sequence of SEQ ID NO:354 or 355. In some embodiments, clone CH3C.35.21.17.2 with the hole mutations, the mutations that modulate effector function, and the mutations that increase serum stability or serum half-life has the sequence of SEQ ID NO:354 or 355.

[0273] Clone CH3C.35.23

[0274] In some embodiments, clone CH3C.35.23 may have a knob mutation (e.g., T136W as numbered with reference to SEQ ID NO:1) and at least 85% identity, at least 90% identity, or at least 95% identity to the sequence of SEQ ID NO:237. In some embodiments, clone CH3C.35.23 with the knob mutation has the sequence of SEQ ID NO:237.

[0275] In some embodiments, clone CH3C.35.23 may have a knob mutation (e.g., T136W as numbered with reference to SEQ ID NO:1), mutations that modulate effector function (e.g., L4A, L5A, and/or P99G (e.g., L4A and L5A) as numbered with reference to SEQ ID NO:1), and at least 85% identity, at least 90% identity, or at least 95% identity to the sequence of SEQ ID NO:238 or 239. In some embodiments, clone CH3C.35.23 with the knob mutation and the mutations that modulate effector function has the sequence of SEQ ID NO:238 or 239.

[0276] In some embodiments, clone CH3C.35.23 may have a knob mutation (e.g., T136W as numbered with reference to SEQ ID NO:1), mutations that increase serum stability or serum half-life (e.g., M22Y, S24T, and T26E as numbered with reference to SEQ ID NO:1), and at least 85% identity, at least 90% identity, or at least 95% identity to the sequence of SEQ ID NO:240. In some embodiments, clone CH3C.35.23 with the knob mutation and the mutations that increase serum stability or serum half-life has the sequence of SEQ ID NO:240.

[0277] In some embodiments, clone CH3C.35.23 may have a knob mutation (e.g., T136W as numbered with reference to SEQ ID NO:1), mutations that increase serum stability or serum half-life (e.g., N204S with or without M198L as numbered with reference to SEQ ID NO:1), and at least 85% identity, at least 90% identity, or at least 95% identity to the sequence of SEQ ID NO:357. In some embodiments, clone CH3C.35.23 with the knob mutation and the mutations that increase serum stability or serum half-life has the sequence of SEQ ID NO:357.

[0278] In some embodiments, clone CH3C.35.23 may have a knob mutation (e.g., T136W as numbered with reference to SEQ ID NO:1), mutations that modulate effector function (e.g., L4A, L5A, and/or P99G (e.g., L4A and L5A) as numbered with reference to SEQ ID NO:1), mutations that increase serum stability or serum half-life (e.g., M22Y, S24T, and T26E as numbered with reference to SEQ ID NO:1), and at least 85% identity, at least 90% identity, or at least 95% identity to the sequence of SEQ ID NO:241 or 242. In some embodiments, clone CH3C.35.23 with the knob mutation, the mutations that modulate effector function, and the mutations that increase serum stability or serum half-life has the sequence of SEQ ID NO:241 or 242.

[0279] In some embodiments, clone CH3C.35.23 may have a knob mutation (e.g., T136W as numbered with reference to SEQ ID NO:1), mutations that modulate effector function (e.g., L4A, L5A, and/or P99G (e.g., L4A and L5A) as numbered with reference to SEQ ID NO:1), mutations that increase serum stability or serum half-life (e.g., N204S with or without M198L as numbered with reference to SEQ ID NO:1), and at least 85% identity, at least 90% identity, or at least 95% identity to the sequence of SEQ ID NO:358 or 359. In some embodiments, clone CH3C.35.23 with the knob mutation, the mutations that modulate effector function, and the mutations that increase serum stability or serum half-life has the sequence of SEQ ID NO:358 or 359.

[0280] In some embodiments, clone CH3C.35.23 may have hole mutations (e.g., T136S, L138A, and Y177V as numbered with reference to SEQ ID NO:1) and at least 85% identity, at least 90% identity, or at least 95% identity to the sequence of SEQ ID NO:243. In some embodiments, clone CH3C.35.23 with the hole mutations has the sequence of SEQ ID NO:243.

[0281] In some embodiments, clone CH3C.35.23 may have hole mutations (e.g., T136S, L138A, and Y177V as numbered with reference to SEQ ID NO:1), mutations that modulate effector function (e.g., L4A, L5A, and/or P99G (e.g., L4A and L5A) as numbered with reference to SEQ ID NO:1), and at least 85% identity, at least 90% identity, or at least 95% identity to the sequence of SEQ ID NO:244 or 245. In some embodiments, clone CH3C.35.23 with the hole mutations and the mutations that modulate effector function has the sequence of SEQ ID NO:244 or 245.

[0282] In some embodiments, clone CH3C.35.23 may have hole mutations (e.g., T136S, L138A, and Y177V as numbered with reference to SEQ ID NO:1), mutations that increase serum stability or serum half-life (e.g., M22Y, S24T, and T26E as numbered with reference to SEQ ID NO:1), and at least 85% identity, at least 90% identity, or at least 95% identity to the sequence of SEQ ID NO:246. In some embodiments, clone CH3C.35.23 with the hole mutations and the mutations that increase serum stability or serum half-life has the sequence of SEQ ID NO:246.

[0283] In some embodiments, clone CH3C.35.23 may have hole mutations (e.g., T136S, L138A, and Y177V as numbered with reference to SEQ ID NO:1), mutations that increase serum stability or serum half-life (e.g., N204S with or without M198L as numbered with reference to SEQ ID NO:1), and at least 85% identity, at least 90% identity, or at least 95% identity to the sequence of SEQ ID NO:360. In some embodiments, clone CH3C.35.23 with the hole mutations and the mutations that increase serum stability or serum half-life has the sequence of SEQ ID NO:360.

[0284] In some embodiments, clone CH3C.35.23 may have hole mutations (e.g., T136S, L138A, and Y177V as numbered with reference to SEQ ID NO:1), mutations that modulate effector function (e.g., L4A, L5A, and/or P99G (e.g., L4A and L5A) as numbered with reference to SEQ ID NO:1), mutations that increase serum stability or serum half-life (e.g., M22Y, S24T, and T26E as numbered with reference to SEQ ID NO:1), and at least 85% identity, at least 90% identity, or at least 95% identity to the sequence of SEQ ID NO:247 or 248. In some embodiments, clone CH3C.35.23 with the hole mutations, the mutations that modulate effector function, and the mutations that increase serum stability or serum half-life has the sequence of SEQ ID NO:247 or 248.

[0285] In some embodiments, clone CH3C.35.23 may have hole mutations (e.g., T136S, L138A, and Y177V as numbered with reference to SEQ ID NO:1), mutations that modulate effector function (e.g., L4A, L5A, and/or P99G (e.g., L4A and L5A) as numbered with reference to SEQ ID NO:1), mutations that increase serum stability or serum half-life (e.g., N204S with or without M198L as numbered with reference to SEQ ID NO:1), and at least 85% identity, at least 90% identity, or at least 95% identity to the sequence of SEQ ID NO:361 or 362. In some embodiments, clone CH3C.35.23 with the hole mutations, the mutations that modulate effector function, and the mutations that increase serum stability or serum half-life has the sequence of SEQ ID NO:361 or 362.

[0286] Clone CH3C.35.21

[0287] In some embodiments, clone CH3C.35.21 may have a knob mutation (e.g., T136W as numbered with reference to SEQ ID NO:1) and at least 85% identity, at least 90% identity, or at least 95% identity to the sequence of SEQ ID NO:250. In some embodiments, clone CH3C.35.21 with the knob mutation has the sequence of SEQ ID NO:250.

[0288] In some embodiments, clone CH3C.35.21 may have a knob mutation (e.g., T136W as numbered with reference to SEQ ID NO:1), mutations that modulate effector function (e.g., L4A, L5A, and/or P99G (e.g., L4A and L5A) as numbered with reference to SEQ ID NO:1), and at least 85% identity, at least 90% identity, or at least 95% identity to the sequence of SEQ ID NO:252 or 275. In some embodiments, clone CH3C.35.21 with the knob mutation and the mutations that modulate effector function has the sequence of SEQ ID NO:252 or 275.

[0289] In some embodiments, clone CH3C.35.21 may have a knob mutation (e.g., T136W as numbered with reference to SEQ ID NO:1), mutations that increase serum stability or serum half-life (e.g., M22Y, S24T, and T26E as numbered with reference to SEQ ID NO:1), and at least 85% identity, at least 90% identity, or at least 95% identity to the sequence of SEQ ID NO:276. In some embodiments, clone CH3C.35.21 with the knob mutation and the mutations that increase serum stability or serum half-life has the sequence of SEQ ID NO:276.

[0290] In some embodiments, clone CH3C.35.21 may have a knob mutation (e.g., T136W as numbered with reference to SEQ ID NO:1), mutations that increase serum stability or serum half-life (e.g., N204S with or without M198L as numbered with reference to SEQ ID NO:1), and at least 85% identity, at least 90% identity, or at least 95% identity to the sequence of SEQ ID NO:364. In some embodiments, clone CH3C.35.21 with the knob mutation and the mutations that increase serum stability or serum half-life has the sequence of SEQ ID NO:364.

[0291] In some embodiments, clone CH3C.35.21 may have a knob mutation (e.g., T136W as numbered with reference to SEQ ID NO:1), mutations that modulate effector function (e.g., L4A, L5A, and/or P99G (e.g., L4A and L5A) as numbered with reference to SEQ ID NO:1), mutations that increase serum stability or serum half-life (e.g., M22Y, S24T, and T26E as numbered with reference to SEQ ID NO:1), and at least 85% identity, at least 90% identity, or at least 95% identity to the sequence of SEQ ID NO:277 or 278. In some embodiments, clone CH3C.35.21 with the knob mutation, the mutations that modulate effector function, and the mutations that increase serum stability or serum half-life has the sequence of SEQ ID NO:277 or 278.

[0292] In some embodiments, clone CH3C.35.21 may have a knob mutation (e.g., T136W as numbered with reference to SEQ ID NO:1), mutations that modulate effector function (e.g., L4A, L5A, and/or P99G (e.g., L4A and L5A) as numbered with reference to SEQ ID NO:1), mutations that increase serum stability or serum half-life (e.g., N204S with or without M198L as numbered with reference to SEQ ID NO:1), and at least 85% identity, at least 90% identity, or at least 95% identity to the sequence of SEQ ID NO:365 or 366. In some embodiments, clone CH3C.35.21 with the knob mutation, the mutations that modulate effector function, and the mutations that increase serum stability or serum half-life has the sequence of SEQ ID NO:365 or 366.

[0293] In some embodiments, clone CH3C.35.21 may have hole mutations (e.g., T136S, L138A, and Y177V as numbered with reference to SEQ ID NO:1) and at least 85% identity, at least 90% identity, or at least 95% identity to the sequence of SEQ ID NO:279. In some embodiments, clone CH3C.35.21 with the hole mutations has the sequence of SEQ ID NO:279.

[0294] In some embodiments, clone CH3C.35.21 may have hole mutations (e.g., T136S, L138A, and Y177V as numbered with reference to SEQ ID NO:1), mutations that modulate effector function (e.g., L4A, L5A, and/or P99G (e.g., L4A and L5A) as numbered with reference to SEQ ID NO:1), and at least 85% identity, at least 90% identity, or at least 95% identity to the sequence of SEQ ID NO:280 or 281. In some embodiments, clone CH3C.35.21 with the hole mutations and the mutations that modulate effector function has the sequence of SEQ ID NO:280 or 281.

[0295] In some embodiments, clone CH3C.35.21 may have hole mutations (e.g., T136S, L138A, and Y177V as numbered with reference to SEQ ID NO:1), mutations that increase serum stability or serum half-life (e.g., M22Y, S24T, and T26E as numbered with reference to SEQ ID NO:1), and at least 85% identity, at least 90% identity, or at least 95% identity to the sequence of SEQ ID NO:282. In some embodiments, clone CH3C.35.21 with the hole mutations and the mutations that increase serum stability or serum half-life has the sequence of SEQ ID NO:282.

[0296] In some embodiments, clone CH3C.35.21 may have hole mutations (e.g., T136S, L138A, and Y177V as numbered with reference to SEQ ID NO:1), mutations that increase serum stability or serum half-life (e.g., N204S with or without M198L as numbered with reference to SEQ ID NO:1), and at least 85% identity, at least 90% identity, or at least 95% identity to the sequence of SEQ ID NO:367. In some embodiments, clone CH3C.35.21 with the hole mutations and the mutations that increase serum stability or serum half-life has the sequence of SEQ ID NO:367.

[0297] In some embodiments, clone CH3C.35.21 may have hole mutations (e.g., T136S, L138A, and Y177V as numbered with reference to SEQ ID NO:1), mutations that modulate effector function (e.g., L4A, L5A, and/or P99G (e.g., L4A and L5A) as numbered with reference to SEQ ID NO:1), mutations that increase serum stability or serum half-life (e.g., M22Y, S24T, and T26E as numbered with reference to SEQ ID NO:1), and at least 85% identity, at least 90% identity, or at least 95% identity to the sequence of SEQ ID NO:283 or 284. In some embodiments, clone CH3C.35.21 with the hole mutations, the mutations that modulate effector function, and the mutations that increase serum stability or serum half-life has the sequence of SEQ ID NO:283 or 284.

[0298] In some embodiments, clone CH3C.35.21 may have hole mutations (e.g., T136S, L138A, and Y177V as numbered with reference to SEQ ID NO:1), mutations that modulate effector function (e.g., L4A, L5A, and/or P99G (e.g., L4A and L5A) as numbered with reference to SEQ ID NO:1), mutations that increase serum stability or serum half-life (e.g., N204S with or without M198L as numbered with reference to SEQ ID NO:1), and at least 85% identity, at least 90% identity, or at least 95% identity to the sequence of SEQ ID NO:368 or 369. In some embodiments, clone CH3C.35.21 with the hole mutations, the mutations that modulate effector function, and the mutations that increase serum stability or serum half-life has the sequence of SEQ ID NO:368 or 369.

[0299] Clone CH3C.35.20.1.1

[0300] In some embodiments, clone CH3C.35.20.1.1 may have a knob mutation (e.g., T136W as numbered with reference to SEQ ID NO:1) and at least 85% identity, at least 90% identity, or at least 95% identity to the sequence of SEQ ID NO:285. In some embodiments, clone CH3C.35.20.1.1 with the knob mutation has the sequence of SEQ ID NO:285.

[0301] In some embodiments, clone CH3C.35.20.1.1 may have a knob mutation (e.g., T136W as numbered with reference to SEQ ID NO:1), mutations that modulate effector function (e.g., L4A, L5A, and/or P99G (e.g., L4A and L5A) as numbered with reference to SEQ ID NO:1), and at least 85% identity, at least 90% identity, or at least 95% identity to the sequence of SEQ ID NO:286 or 287. In some embodiments, clone CH3C.35.20.1.1 with the knob mutation and the mutations that modulate effector function has the sequence of SEQ ID NO:286 or 287.

[0302] In some embodiments, clone CH3C.35.20.1.1 may have a knob mutation (e.g., T136W as numbered with reference to SEQ ID NO:1), mutations that increase serum stability or serum half-life (e.g., M22Y, S24T, and T26E as numbered with reference to SEQ ID NO:1), and at least 85% identity, at least 90% identity, or at least 95% identity to the sequence of SEQ ID NO:288. In some embodiments, clone CH3C.35.20.1.1 with the knob mutation and the mutations that increase serum stability or serum half-life has the sequence of SEQ ID NO:288.

[0303] In some embodiments, clone CH3C.35.20.1.1 may have a knob mutation (e.g., T136W as numbered with reference to SEQ ID NO:1), mutations that increase serum stability or serum half-life (e.g., N204S with or without M198L as numbered with reference to SEQ ID NO:1), and at least 85% identity, at least 90% identity, or at least 95% identity to the sequence of SEQ ID NO:371. In some embodiments, clone CH3C.35.20.1.1 with the knob mutation and the mutations that increase serum stability or serum half-life has the sequence of SEQ ID NO:371.

[0304] In some embodiments, clone CH3C.35.20.1.1 may have a knob mutation (e.g., T136W as numbered with reference to SEQ ID NO:1), mutations that modulate effector function (e.g., L4A, L5A, and/or P99G (e.g., L4A and L5A) as numbered with reference to SEQ ID NO:1), mutations that increase serum stability or serum half-life (e.g., M22Y, S24T, and T26E as numbered with reference to SEQ ID NO:1), and at least 85% identity, at least 90% identity, or at least 95% identity to the sequence of SEQ ID NO:289 or 290. In some embodiments, clone CH3C.35.20.1.1 with the knob mutation, the mutations that modulate effector function, and the mutations that increase serum stability or serum half-life has the sequence of SEQ ID NO:289 or 290.

[0305] In some embodiments, clone CH3C.35.20.1.1 may have a knob mutation (e.g., T136W as numbered with reference to SEQ ID NO:1), mutations that modulate effector function (e.g., L4A, L5A, and/or P99G (e.g., L4A and L5A) as numbered with reference to SEQ ID NO:1), mutations that increase serum stability or serum half-life (e.g., N204S with or without M198L as numbered with reference to SEQ ID NO:1), and at least 85% identity, at least 90% identity, or at least 95% identity to the sequence of SEQ ID NO:372 or 373. In some embodiments, clone CH3C.35.20.1.1 with the knob mutation, the mutations that modulate effector function, and the mutations that increase serum stability or serum half-life has the sequence of SEQ ID NO:372 or 373.

[0306] In some embodiments, clone CH3C.35.20.1.1 may have hole mutations (e.g., T136S, L138A, and Y177V as numbered with reference to SEQ ID NO:1) and at least 85% identity, at least 90% identity, or at least 95% identity to the sequence of SEQ ID NO:291. In some embodiments, clone CH3C.35.20.1.1 with the hole mutations has the sequence of SEQ ID NO:291.

[0307] In some embodiments, clone CH3C.35.20.1.1 may have hole mutations (e.g., T136S, L138A, and Y177V as numbered with reference to SEQ ID NO:1), mutations that modulate effector function (e.g., L4A, L5A, and/or P99G (e.g., L4A and L5A) as numbered with reference to SEQ ID NO:1), and at least 85% identity, at least 90% identity, or at least 95% identity to the sequence of SEQ ID NO:292 or 293. In some embodiments, clone CH3C.35.20.1.1 with the hole mutations and the mutations that modulate effector function has the sequence of SEQ ID NO:292 or 293.

[0308] In some embodiments, clone CH3C.35.20.1.1 may have hole mutations (e.g., T136S, L138A, and Y177V as numbered with reference to SEQ ID NO:1), mutations that increase serum stability or serum half-life (e.g., M22Y, S24T, and T26E as numbered with reference to SEQ ID NO:1), and at least 85% identity, at least 90% identity, or at least 95% identity to the sequence of SEQ ID NO:294. In some embodiments, clone CH3C.35.20.1.1 with the hole mutations and the mutations that increase serum stability or serum half-life has the sequence of SEQ ID NO:294.

[0309] In some embodiments, clone CH3C.35.20.1.1 may have hole mutations (e.g., T136S, L138A, and Y177V as numbered with reference to SEQ ID NO:1), mutations that increase serum stability or serum half-life (e.g., N204S with or without M198L as numbered with reference to SEQ ID NO:1), and at least 85% identity, at least 90% identity, or at least 95% identity to the sequence of SEQ ID NO:374. In some embodiments, clone CH3C.35.20.1.1 with the hole mutations and the mutations that increase serum stability or serum half-life has the sequence of SEQ ID NO:374.

[0310] In some embodiments, clone CH3C.35.20.1.1 may have hole mutations (e.g., T136S, L138A, and Y177V as numbered with reference to SEQ ID NO:1), mutations that modulate effector function (e.g., L4A, L5A, and/or P99G (e.g., L4A and L5A) as numbered with reference to SEQ ID NO:1), mutations that increase serum stability or serum half-life (e.g., M22Y, S24T, and T26E as numbered with reference to SEQ ID NO:1), and at least 85% identity, at least 90% identity, or at least 95% identity to the sequence of SEQ ID NO:295 or 296. In some embodiments, clone CH3C.35.20.1.1 with the hole mutations, the mutations that modulate effector function, and the mutations that increase serum stability or serum half-life has the sequence of SEQ ID NO:295 or 296.

[0311] In some embodiments, clone CH3C.35.20.1.1 may have hole mutations (e.g., T136S, L138A, and Y177V as numbered with reference to SEQ ID NO:1), mutations that modulate effector function (e.g., L4A, L5A, and/or P99G (e.g., L4A and L5A) as numbered with reference to SEQ ID NO:1), mutations that increase serum stability or serum half-life (e.g., N204S with or without M198L as numbered with reference to SEQ ID NO:1), and at least 85% identity, at least 90% identity, or at least 95% identity to the sequence of SEQ ID NO:375 or 376. In some embodiments, clone CH3C.35.20.1.1 with the hole mutations, the mutations that modulate effector function, and the mutations that increase serum stability or serum half-life has the sequence of SEQ ID NO:375 or 376.

[0312] Clone CH3C.35.23.2.1

[0313] In some embodiments, clone CH3C.35.23.2.1 may have a knob mutation (e.g., T136W as numbered with reference to SEQ ID NO:1) and at least 85% identity, at least 90% identity, or at least 95% identity to the sequence of SEQ ID NO:297. In some embodiments, clone CH3C.35.23.2.1 with the knob mutation has the sequence of SEQ ID NO:297.

[0314] In some embodiments, clone CH3C.35.23.2.1 may have a knob mutation (e.g., T136W as numbered with reference to SEQ ID NO:1), mutations that modulate effector function (e.g., L4A, L5A, and/or P99G (e.g., L4A and L5A) as numbered with reference to SEQ ID NO:1), and at least 85% identity, at least 90% identity, or at least 95% identity to the sequence of SEQ ID NO:298 or 299. In some embodiments, clone CH3C.35.23.2.1 with the knob mutation and the mutations that modulate effector function has the sequence of SEQ ID NO:298 or 299.

[0315] In some embodiments, clone CH3C.35.23.2.1 may have a knob mutation (e.g., T136W as numbered with reference to SEQ ID NO:1), mutations that increase serum stability or serum half-life (e.g., M22Y, S24T, and T26E as numbered with reference to SEQ ID NO:1), and at least 85% identity, at least 90% identity, or at least 95% identity to the sequence of SEQ ID NO:300. In some embodiments, clone CH3C.35.23.2.1 with the knob mutation and the mutations that increase serum stability or serum half-life has the sequence of SEQ ID NO:300.

[0316] In some embodiments, clone CH3C.35.23.2.1 may have a knob mutation (e.g., T136W as numbered with reference to SEQ ID NO:1), mutations that increase serum stability or serum half-life (e.g., N204S with or without M198L as numbered with reference to SEQ ID NO:1), and at least 85% identity, at least 90% identity, or at least 95% identity to the sequence of SEQ ID NO:378. In some embodiments, clone CH3C.35.23.2.1 with the knob mutation and the mutations that increase serum stability or serum half-life has the sequence of SEQ ID NO:378.

[0317] In some embodiments, clone CH3C.35.23.2.1 may have a knob mutation (e.g., T136W as numbered with reference to SEQ ID NO:1), mutations that modulate effector function (e.g., L4A, L5A, and/or P99G (e.g., L4A and L5A) as numbered with reference to SEQ ID NO:1), mutations that increase serum stability or serum half-life (e.g., M22Y, S24T, and T26E as numbered with reference to SEQ ID NO:1), and at least 85% identity, at least 90% identity, or at least 95% identity to the sequence of SEQ ID NO:301 or 302. In some embodiments, clone CH3C.35.23.2.1 with the knob mutation, the mutations that modulate effector function, and the mutations that increase serum stability or serum half-life has the sequence of SEQ ID NO:301 or 302.

[0318] In some embodiments, clone CH3C.35.23.2.1 may have a knob mutation (e.g., T136W as numbered with reference to SEQ ID NO:1), mutations that modulate effector function (e.g., L4A, L5A, and/or P99G (e.g., L4A and L5A) as numbered with reference to SEQ ID NO:1), mutations that increase serum stability or serum half-life (e.g., N204S with or without M198L as numbered with reference to SEQ ID NO:1), and at least 85% identity, at least 90% identity, or at least 95% identity to the sequence of SEQ ID NO:379 or 380. In some embodiments, clone CH3C.35.23.2.1 with the knob mutation, the mutations that modulate effector function, and the mutations that increase serum stability or serum half-life has the sequence of SEQ ID NO:379 or 380.

[0319] In some embodiments, clone CH3C.35.23.2.1 may have hole mutations (e.g., T136S, L138A, and Y177V as numbered with reference to SEQ ID NO:1) and at least 85% identity, at least 90% identity, or at least 95% identity to the sequence of SEQ ID NO:303. In some embodiments, clone CH3C.35.23.2.1 with the hole mutations has the sequence of SEQ ID NO:303.

[0320] In some embodiments, clone CH3C.35.23.2.1 may have hole mutations (e.g., T136S, L138A, and Y177V as numbered with reference to SEQ ID NO:1), mutations that modulate effector function (e.g., L4A, L5A, and/or P99G (e.g., L4A and L5A) as numbered with reference to SEQ ID NO:1), and at least 85% identity, at least 90% identity, or at least 95% identity to the sequence of SEQ ID NO:304 or 305. In some embodiments, clone CH3C.35.23.2.1 with the hole mutations and the mutations that modulate effector function has the sequence of SEQ ID NO:304 or 305.

[0321] In some embodiments, clone CH3C.35.23.2.1 may have hole mutations (e.g., T136S, L138A, and Y177V as numbered with reference to SEQ ID NO:1), mutations that increase serum stability or serum half-life (e.g., M22Y, S24T, and T26E as numbered with reference to SEQ ID NO:1), and at least 85% identity, at least 90% identity, or at least 95% identity to the sequence of SEQ ID NO:306. In some embodiments, clone CH3C.35.23.2.1 with the hole mutations and the mutations that increase serum stability or serum half-life has the sequence of SEQ ID NO:306.

[0322] In some embodiments, clone CH3C.35.23.2.1 may have hole mutations (e.g., T136S, L138A, and Y177V as numbered with reference to SEQ ID NO:1), mutations that increase serum stability or serum half-life (e.g., N204S with or without M198L as numbered with reference to SEQ ID NO:1), and at least 85% identity, at least 90% identity, or at least 95% identity to the sequence of SEQ ID NO:381. In some embodiments, clone CH3C.35.23.2.1 with the hole mutations and the mutations that increase serum stability or serum half-life has the sequence of SEQ ID NO:381.

[0323] In some embodiments, clone CH3C.35.23.2.1 may have hole mutations (e.g., T136S, L138A, and Y177V as numbered with reference to SEQ ID NO:1), mutations that modulate effector function (e.g., L4A, L5A, and/or P99G (e.g., L4A and L5A) as numbered with reference to SEQ ID NO:1), mutations that increase serum stability or serum half-life (e.g., M22Y, S24T, and T26E as numbered with reference to SEQ ID NO:1), and at least 85% identity, at least 90% identity, or at least 95% identity to the sequence of SEQ ID NO:307 or 308. In some embodiments, clone CH3C.35.23.2.1 with the hole mutations, the mutations that modulate effector function, and the mutations that increase serum stability or serum half-life has the sequence of SEQ ID NO:307 or 308.

[0324] In some embodiments, clone CH3C.35.23.2.1 may have hole mutations (e.g., T136S, L138A, and Y177V as numbered with reference to SEQ ID NO:1), mutations that modulate effector function (e.g., L4A, L5A, and/or P99G (e.g., L4A and L5A) as numbered with reference to SEQ ID NO:1), mutations that increase serum stability or serum half-life (e.g., N204S with or without M198L as numbered with reference to SEQ ID NO:1), and at least 85% identity, at least 90% identity, or at least 95% identity to the sequence of SEQ ID NO:382 or 383. In some embodiments, clone CH3C.35.23.2.1 with the hole mutations, the mutations that modulate effector function, and the mutations that increase serum stability or serum half-life has the sequence of SEQ ID NO:382 or 383.

[0325] Clone CH3C.35.23.1.1

[0326] In some embodiments, clone CH3C.35.23.1.1 may have a knob mutation (e.g., T136W as numbered with reference to SEQ ID NO:1) and at least 85% identity, at least 90% identity, or at least 95% identity to the sequence of SEQ ID NO:309. In some embodiments, clone CH3C.35.23.1.1 with the knob mutation has the sequence of SEQ ID NO:309.

[0327] In some embodiments, clone CH3C.35.23.1.1 may have a knob mutation (e.g., T136W as numbered with reference to SEQ ID NO:1), mutations that modulate effector function (e.g., L4A, L5A, and/or P99G (e.g., L4A and L5A) as numbered with reference to SEQ ID NO:1), and at least 85% identity, at least 90% identity, or at least 95% identity to the sequence of SEQ ID NO:310 or 311. In some embodiments, clone CH3C.35.23.1.1 with the knob mutation and the mutations that modulate effector function has the sequence of SEQ ID NO:310 or 311.

[0328] In some embodiments, clone CH3C.35.23.1.1 may have a knob mutation (e.g., T136W as numbered with reference to SEQ ID NO:1), mutations that increase serum stability or serum half-life (e.g., M22Y, S24T, and T26E as numbered with reference to SEQ ID NO:1), and at least 85% identity, at least 90% identity, or at least 95% identity to the sequence of SEQ ID NO:312. In some embodiments, clone CH3C.35.23.1.1 with the knob mutation and the mutations that increase serum stability or serum half-life has the sequence of SEQ ID NO:312.

[0329] In some embodiments, clone CH3C.35.23.1.1 may have a knob mutation (e.g., T136W as numbered with reference to SEQ ID NO:1), mutations that increase serum stability or serum half-life (e.g., N204S with or without M198L as numbered with reference to SEQ ID NO:1), and at least 85% identity, at least 90% identity, or at least 95% identity to the sequence of SEQ ID NO:385. In some embodiments, clone CH3C.35.23.1.1 with the knob mutation and the mutations that increase serum stability or serum half-life has the sequence of SEQ ID NO:385.

[0330] In some embodiments, clone CH3C.35.23.1.1 may have a knob mutation (e.g., T136W as numbered with reference to SEQ ID NO:1), mutations that modulate effector function (e.g., L4A, L5A, and/or P99G (e.g., L4A and L5A) as numbered with reference to SEQ ID NO:1), mutations that increase serum stability or serum half-life (e.g., M22Y, S24T, and T26E as numbered with reference to SEQ ID NO:1), and at least 85% identity, at least 90% identity, or at least 95% identity to the sequence of SEQ ID NO:313 or 314. In some embodiments, clone CH3C.35.23.1.1 with the knob mutation, the mutations that modulate effector function, and the mutations that increase serum stability or serum half-life has the sequence of SEQ ID NO:313 or 314.

[0331] In some embodiments, clone CH3C.35.23.1.1 may have a knob mutation (e.g., T136W as numbered with reference to SEQ ID NO:1), mutations that modulate effector function (e.g., L4A, L5A, and/or P99G (e.g., L4A and L5A) as numbered with reference to SEQ ID NO:1), mutations that increase serum stability or serum half-life (e.g., N204S with or without M198L as numbered with reference to SEQ ID NO:1), and at least 85% identity, at least 90% identity, or at least 95% identity to the sequence of SEQ ID NO:386 or 387. In some embodiments, clone CH3C.35.23.1.1 with the knob mutation, the mutations that modulate effector function, and the mutations that increase serum stability or serum half-life has the sequence of SEQ ID NO:386 or 387.

[0332] In some embodiments, clone CH3C.35.23.1.1 may have hole mutations (e.g., T136S, L138A, and Y177V as numbered with reference to SEQ ID NO:1) and at least 85% identity, at least 90% identity, or at least 95% identity to the sequence of SEQ ID NO:315. In some embodiments, clone CH3C.35.23.1.1 with the hole mutations has the sequence of SEQ ID NO:315.

[0333] In some embodiments, clone CH3C.35.23.1.1 may have hole mutations (e.g., T136S, L138A, and Y177V as numbered with reference to SEQ ID NO:1), mutations that modulate effector function (e.g., L4A, L5A, and/or P99G (e.g., L4A and L5A) as numbered with reference to SEQ ID NO:1), and at least 85% identity, at least 90% identity, or at least 95% identity to the sequence of SEQ ID NO:316 or 317. In some embodiments, clone CH3C.35.23.1.1 with the hole mutations and the mutations that modulate effector function has the sequence of SEQ ID NO:316 or 317.

[0334] In some embodiments, clone CH3C.35.23.1.1 may have hole mutations (e.g., T136S, L138A, and Y177V as numbered with reference to SEQ ID NO:1), mutations that increase serum stability or serum half-life (e.g., M22Y, S24T, and T26E as numbered with reference to SEQ ID NO:1), and at least 85% identity, at least 90% identity, or at least 95% identity to the sequence of SEQ ID NO:318. In some embodiments, clone CH3C.35.23.1.1 with the hole mutations and the mutations that increase serum stability or serum half-life has the sequence of SEQ ID NO:318.

[0335] In some embodiments, clone CH3C.35.23.1.1 may have hole mutations (e.g., T136S, L138A, and Y177V as numbered with reference to SEQ ID NO:1), mutations that increase serum stability or serum half-life (e.g., N204S with or without M198L as numbered with reference to SEQ ID NO:1), and at least 85% identity, at least 90% identity, or at least 95% identity to the sequence of SEQ ID NO:388. In some embodiments, clone CH3C.35.23.1.1 with the hole mutations and the mutations that increase serum stability or serum half-life has the sequence of SEQ ID NO:388.

[0336] In some embodiments, clone CH3C.35.23.1.1 may have hole mutations (e.g., T136S, L138A, and Y177V as numbered with reference to SEQ ID NO:1), mutations that modulate effector function (e.g., L4A, L5A, and/or P99G (e.g., L4A and L5A) as numbered with reference to SEQ ID NO:1), mutations that increase serum stability or serum half-life (e.g., M22Y, S24T, and T26E as numbered with reference to SEQ ID NO:1), and at least 85% identity, at least 90% identity, or at least 95% identity to the sequence of SEQ ID NO:319 or 320. In some embodiments, clone CH3C.35.23.1.1 with the hole mutations, the mutations that modulate effector function, and the mutations that increase serum stability or serum half-life has the sequence of SEQ ID NO:319 or 320.

[0337] In some embodiments, clone CH3C.35.23.1.1 may have hole mutations (e.g., T136S, L138A, and Y177V as numbered with reference to SEQ ID NO:1), mutations that modulate effector function (e.g., L4A, L5A, and/or P99G (e.g., L4A and L5A) as numbered with reference to SEQ ID NO:1), mutations that increase serum stability or serum half-life (e.g., N204S with or without M198L as numbered with reference to SEQ ID NO:1), and at least 85% identity, at least 90% identity, or at least 95% identity to the sequence of SEQ ID NO:389 or 390. In some embodiments, clone CH3C.35.23.1.1 with the hole mutations, the mutations that modulate effector function, and the mutations that increase serum stability or serum half-life has the sequence of SEQ ID NO:389 or 390.

### VIII. Formats for TfR-Binding Proteins

[0338] In some embodiments, a modified TfR-binding polypeptide as described herein is a subunit of a protein dimer. In some embodiments, the dimer is a heterodimer. In some embodiments, the dimer is a homodimer. In some embodiments, the dimer comprises a single Fc polypeptide that binds to the TfR receptor, i.e., is monovalent for TfR receptor binding. In some embodiments, the dimer comprises a second polypeptide that binds to the TfR receptor. The second polypeptide may comprise the same modified Fc polypeptide to provide a bivalent homodimer protein, or a second modified Fc polypeptide described herein may provide a second TfR receptor-binding site.

[0339] TfR-binding polypeptides described herein and dimeric or multimeric proteins comprising polypeptides may have a broad range of binding affinities, e.g., based on the format of the polypeptide. For example, in some embodiments, a polypeptide comprising a modified Fc polypeptide as described herein has an affinity for the TfR ranging anywhere from 1 pM to 10 μM. In some embodiments, affinity may be measured in a monovalent format. In other embodiments, affinity may be measured in a bivalent format, e.g., as a protein dimer comprising a modified Fc polypeptide.

[0340] Methods for analyzing binding affinity, binding kinetics, and cross-reactivity to analyze binding to TfR are known in the art. These methods include, but are not limited to, solid-phase binding assays (e.g., ELISA assay), immunoprecipitation, surface plasmon resonance (e.g., Biacore™ (GE Healthcare, Piscataway, N.J.)), kinetic exclusion assays (e.g., KinExA®), flow cytometry, fluorescence-activated cell sorting (FACS), BioLayer interferometry (e.g., Octet® (FortéBio, Inc., Menlo Park, Calif.)), and Western blot analysis. In some embodiments, ELISA is used to determine binding affinity and/or cross-reactivity. Methods for performing ELISA assays are known in the art and are also described in the Example section below. In some embodiments, surface plasmon resonance (SPR) is used to determine binding affinity, binding kinetics, and/or cross-reactivity. In some embodiments, kinetic exclusion assays are used to determine binding affinity, binding kinetics, and/or cross-reactivity. In some embodiments, BioLayer interferometry assays are used to determine binding affinity, binding kinetics, and/or cross-reactivity. FcRn binding of TfR-binding polypeptide may also be evaluated using these types of assays. FcRn binding is typically assayed under acidic conditions, e.g., at a pH of about 5 to about 6.

### IX. TfR-Binding Protein Conjugates

[0341] In some embodiments, a modified polypeptide that binds TfR and initiates transport across the BBB comprises a modified Fc polypeptide as described herein and further comprises a partial or full hinge region. The hinge region can be from any immunoglobulin subclass or isotype. An illustrative immunoglobulin hinge is an IgG hinge region, such as an IgG1 hinge region, e.g., human IgG1 hinge amino acid sequence EPKSCDKTHTCPPCP (SEQ ID NO:62). In further embodiments, the polypeptide, which may comprise a hinge or partial hinge region, is further fused to another moiety, for example, an immunoglobulin variable region, thus generating a TfR-binding polypeptide-variable region fusion polypeptide. The variable region may bind to any antigen of interest, e.g., a therapeutic neurological target, or a diagnostic neurological target.

[0342] In some embodiments, the TfR-binding polypeptide (e.g., modified Fc polypeptide) is fused to a variable region via a linker. As indicated in the preceding paragraph, the TfR-binding polypeptide (e.g., modified Fc polypeptide) may be fused to the variable region by a hinge region. In some embodiments, the TfR-binding polypeptide (e.g., modified Fc polypeptide) may be fused to the variable region by a peptide linker. The peptide linker may be configured such that it allows for the rotation of the variable region and the TfR-binding polypeptide relative to each other; and/or is resistant to digestion by proteases. In some embodiments, the linker may be a flexible linker, e.g., containing amino acids such as Gly, Asn, Ser, Thr, Ala, and the like. Such linkers are designed using known parameters. For example, the linker may have repeats, such as Gly-Ser repeats.

[0343] The variable region may be in any antibody format, e.g., a Fab or scFv format. In some embodiments, an antibody variable region sequence comprises two antibody variable region heavy chains and two antibody variable region light chains, or respective fragments thereof.

[0344] A TfR-binding polypeptide (e.g., modified Fc polypeptide) may also be fused to a polypeptide other than an immunoglobulin variable region that targets an antigen of interest. In some embodiments, such a polypeptide is fused to the TfR-binding polypeptide using a peptide linker, e.g., a flexible linker, as described above.

[0345] In some embodiments, a TfR-binding polypeptide may be fused to a polypeptide, e.g., a therapeutic polypeptide, that is desirable to target to a cell expressing the TfR-binding polypeptide. In some embodiments, the TfR-binding polypeptide is fused to a biologically active polypeptide for transport across the BBB, e.g., a soluble protein, e.g., an extracellular domain of a receptor or a growth factor, a cytokine, or an enzyme.

[0346] In still other embodiments, the TfR-binding polypeptide may be fused to a peptide or protein useful in protein purification, e.g., polyhistidine, epitope tags, e.g., FLAG, c-Myc, hemagglutinin tags and the like, glutathione S transferase (GST), thioredoxin, protein A, protein G, or maltose binding protein (MBP). In some cases, the peptide or protein to which the TfR-binding polypeptide is fused may comprise a protease cleavage site, such as a cleavage site for Factor Xa or Thrombin. In certain embodiments, the linkage is cleavable by an enzyme present in the central nervous system.

[0347] Non-polypeptide agents may also be attached to a TfR-binding polypeptide. Such agents include cytotoxic agents, imaging agents, a DNA or RNA molecule, or a chemical compound. In some embodiments, the agent may be a therapeutic or imaging chemical compound. In some embodiments, the agent is a small molecule, e.g., less than 1000 Da, less than 750 Da, or less than 500 Da.

[0348] An agent, either a polypeptide or non-polypeptide, may be attached to the N-terminal or C-terminal region of the TfR-binding polypeptide, or attached to any region of the polypeptide, so long as the agent does not interfere with binding of the TfR-binding polypeptide to TfR.

[0349] In various embodiments, the conjugates can be generated using well-known chemical cross-linking reagents and protocols. For example, there are a large number of chemical cross-linking agents that are known to those skilled in the art and useful for cross-linking the polypeptide with an agent of interest. For example, the cross-linking agents are heterobifunctional cross-linkers, which can be used to link molecules in a stepwise manner. Heterobifunctional cross-linkers provide the ability to design more specific coupling methods for conjugating proteins, thereby reducing the occurrences of unwanted side reactions such as homo-protein polymers.

[0350] The agent of interest may be a therapeutic agent, including cytotoxic agents and the like, or a chemical moiety. In some embodiments, the agent may be a peptide or small molecule therapeutic or imaging agent.

### X. Methods to Increase Effector Function

[0351] For some applications, it is desirable to introduce modifications into modified Fc polypeptides or modified Fc polypeptide dimers described herein that increase effector function (e.g., ADCC). One method for increasing effector function involves producing modified Fc polypeptides or modified Fc polypeptide dimers that are afucosylated or fucose-deficient.

[0352] One approach for generating fucose-deficient modified Fc polypeptides or modified Fc polypeptide dimers is to use a fucose analog such as 2-fluorofucose (2-FF). Fucose analogs can deplete or decrease the availability of GDP-fucose, which is a substrate required by fucosyltransferases to incorporate fucose into proteins.

[0353] An alternative approach for generating fucose-deficient modified Fc polypeptides or modified Fc polypeptide dimers, commonly used for commercial production, is to employ an alpha-1,6 fucosyltransferase (FUT8) knockout cell line for expression of the modified Fc polypeptides or modified Fc polypeptide dimers. A non-limiting example of a suitable FUT8 knockout cell line is the Chinese hamster ovary (CHO) FUT8 knockout cell line available from Lonza Biologics. Furthermore, as described in Mori et al. (Biotechnol. Bioeng. (2004) 88:901-908; hereby incorporated by reference in its entirety), FUT8 small interfering RNA (siRNA) can be used to convert CHO cell lines (e.g., by constitutive expression of the FUT8 siRNA) for the production of fucose-deficient proteins.

### XI. Nucleic Acids, Vectors, and Host Cells

[0354] Modified TfR-binding polypeptides as described herein are typically prepared using recombinant methods. Accordingly, isolated nucleic acids comprising a nucleic acid sequence encoding any of the polypeptides comprising modified Fc polypeptides as described herein, and host cells into which the nucleic acids are introduced that are used to replicate the polypeptide-encoding nucleic acids and/or to express the polypeptides. In some embodiments, the host cell is eukaryotic, e.g., a human cell.

[0355] In another aspect, polynucleotides are provided that comprise a nucleotide sequence that encodes the polypeptides described herein. The polynucleotides may be single-stranded or double-stranded. In some embodiments, the polynucleotide is DNA. In particular embodiments, the polynucleotide is cDNA. In some embodiments, the polynucleotide is RNA.

[0356] In some embodiments, the polynucleotide is included within a nucleic acid construct. In some embodiments, the construct is a replicable vector. In some embodiments, the vector is selected from a plasmid, a viral vector, a phagemid, a yeast chromosomal vector, and a non-episomal mammalian vector.

[0357] In some embodiments, the polynucleotide is operably linked to one or more regulatory nucleotide sequences in an expression construct. In one series of embodiments, the nucleic acid expression constructs are adapted for use as a surface expression library. In some embodiments, the library is adapted for surface expression in yeast. In some embodiments, the library is adapted for surface expression in phage. In another series of embodiments, the nucleic acid expression constructs are adapted for expression of the polypeptide in a system that permits isolation of the polypeptide in milligram or gram quantities. In some embodiments, the system is a mammalian cell expression system. In some embodiments, the system is a yeast cell expression system.

[0358] Expression vehicles for production of a recombinant polypeptide include plasmids and other vectors. For instance, suitable vectors include plasmids of the following types: pBR322-derived plasmids, pEMBL-derived plasmids, pEX-derived plasmids, pBTac-derived plasmids, and pUC-derived plasmids for expression in prokaryotic cells, such as E. coli. The pcDNAI/amp, pcDNAI/neo, pRc/CMV, pSV2gpt, pSV2neo, pSV2-dhfr, pTk2, pRSVneo, pMSG, pSVT7, pko-neo, and pHyg-derived vectors are examples of mammalian expression vectors suitable for transfection of eukaryotic cells. Alternatively, derivatives of viruses such as the bovine papilloma virus (BPV-1), or Epstein-Barr virus (pHEBo, pREP-derived, and p205) can be used for transient expression of polypeptides in eukaryotic cells. In some embodiments, it may be desirable to express the recombinant polypeptide by the use of a baculovirus expression system. Examples of such baculovirus expression systems include pVL-derived vectors (such as pVL1392, pVL1393, and pVL941), pAcUW-derived vectors (such as pAcUW1), and pBlueBac-derived vectors. Additional expression systems include adenoviral, adeno-associated virus, and other viral expression systems.

[0359] Vectors may be transformed into any suitable host cell. In some embodiments, the host cells, e.g., bacteria or yeast cells, may be adapted for use as a surface expression library. In some cells, the vectors are expressed in host cells to express relatively large quantities of the polypeptide. Such host cells include mammalian cells, yeast cells, insect cells, and prokaryotic cells. In some embodiments, the cells are mammalian cells, such as Chinese Hamster Ovary (CHO) cell, baby hamster kidney (BHK) cell, NS0 cell, Y0 cell, HEK293 cell, COS cell, Vero cell, or HeLa cell.

[0360] A host cell transfected with an expression vector encoding a TfR-binding polypeptide can be cultured under appropriate conditions to allow expression of the polypeptide to occur. The polypeptides may be secreted and isolated from a mixture of cells and medium containing the polypeptides. Alternatively, the polypeptide may be retained in the cytoplasm or in a membrane fraction and the cells harvested, lysed, and the polypeptide isolated using a desired method.

### XII. Examples

[0361] The following examples are included to demonstrate specific embodiments of the disclosure. It should be appreciated by those of skill in the art that the techniques disclosed in the examples which follow represent techniques to function well in the practice of the disclosure, and thus can be considered to constitute specific modes for its practice. However, those of skill in the art should, in light of the present disclosure, appreciate that many changes can be made in the specific embodiments which are disclosed and still obtain a like or similar result without departing from the spirit and scope of the disclosure.

### Example 1. Generation of TfR-Binding Polypeptides

[0362] Fc polypeptides that bind to TfR were engineered using combinatorial libraries as specific positions in the CH3 region, and selecting these libraries for binders to human TfR. Affinity maturation of initial TfR binding sequences led to identification of specific TfR-binding Fc polypeptides, for example, Fc polypeptide having the sequence of SEQ ID NO:66. An Fc polypeptide dimer-Fab fusion containing a heterodimeric Fc polypeptide dimer was constructed by co-expressing the following three polypeptides in a 1:1:2 ratio, respectively. The resulting tetrameric Fc polypeptide dimer-Fab fusion protein is termed BACE1-3C.35.21.

[0363] (1) Heavy chain containing a Fab region, a hinge region, and a modified Fc polypeptide fused to each other in this order in tandem series. The Fab region contains the heavy chain variable region of a BACE1-binding antibody. The hinge region has the sequence of SEQ ID NO:62. The Fc polypeptide has the sequence of SEQ ID NO:250 and contains the “knob” mutation (T366W according to EU numbering scheme) and the TfR-binding mutations.

[0364] (2) Heavy chain containing a Fab region, a hinge region, and a modified Fc polypeptide fused to each other in this order in tandem series. The Fab region contains the heavy chain variable region of a BACE1-binding antibody. The hinge region has the sequence of SEQ ID NO:62. The Fc polypeptide has the sequence of SEQ ID NO:251 and contains “hole” mutations (T366S, L368A, and Y407V according to EU numbering scheme).

[0365] (3) Light chain containing the light chain variable region of a BACE1-binding antibody.

[0366] DNA encoded for genes to express the three polypeptides above was cloned into expression vectors and transfected into ExpiCHO cells (Thermo Fisher Scientific) at a ratio of 1:1:2, respectively. After 5-7 days, the cells were harvested, and the resulting polypeptide was purified by Protein A followed by HIC using methods familiar to one with skill in the art. The resulting polypeptide was analyzed by mass spectrometry to demonstrate that no fusion proteins having homodimeric Fc polypeptide dimers (i.e., Fc polypeptide dimer having two Fc polypeptides both having the “knob” mutation, or Fc polypeptide dimer having two Fc polypeptides both having “hole” mutations) were present after purification. Additional tetramer polypeptides were generated analogously.

### Example 2. Generation of Human Apical Domain Knock-in Mice (Human TfR Knock-In (TfR^{ms/hu} KI) Mice)

[0367] Methods for generating knock-in/knock-out mice have been published in the literature and are well known to those with skill in the art. In summary, TfR^{ms/hu} KI mice were generated using CRISPR/Cas9 technology to express human Tfrc apical domain within the murine Tfrc gene; the resulting chimeric TfR was expressed in vivo under the control of the endogenous promoter. As described in International Patent Application No. PCT/US2018/018302, which is incorporated by reference in its entirety herein, C57B16 mice were used to generate a knock-in of the human apical TfR mouse line via pronuclear microinjection into single cell embryos, followed by embryo transfer to pseudo pregnant females. Specifically, Cas9, single guide RNAs having the sequences of SEQ ID NOS:264 and 265, and a donor DNA having the sequence of SEQ ID NO:267, were introduced into the embryos. The donor DNA comprised the human apical domain coding sequence (SEQ ID NO:266 that has been codon optimized for expression in mouse). The apical domain coding sequence was flanked with a left (nucleotides 1-817 of SEQ ID NO:267) and right homology arm (nucleotides 1523-2329 of SEQ ID NO:267). The donor sequence was designed in this manner such that the apical domain was to be inserted after the fourth mouse exon, and was immediately flanked at the 3′ end by the ninth mouse exon. A founder male from the progeny of the female that received the embryos was bred to wild-type females to generate F1 heterozygous mice. Homozygous mice were subsequently generated from breeding of F1 generation heterozygous mice.

### Example 3. TfR-Binding Fc Polypeptides Having LALA Mutations in Both Fc Polypeptides Prevent Reticulocyte Depletion in Mice

[0368] Antibodies that bind to TfR have been shown to deplete both circulating reticulocytes and bone marrow reticulocytes when administered to mice (see, e.g., Couch et al., Sci Transl Med, 5:183ra57, 1-12, 2013). An Fc polypeptide dimer-Fab fusion analogous to BACE1-3C.35.21 described in Example 1 was generated. The Fc polypeptide dimer-Fab fusion, termed “BACE1-3C.35.21^{2XLALA},” contains the following: (1) heavy chain containing a Fab region having heavy chain variable region of a BACE1-binding antibody, a hinge region, and a modified Fc polypeptide having the “knob” mutation (T366W according to EU numbering scheme), the mutations that reduce effector function (L234A and L235A according to EU numbering scheme), and the TfR-binding mutations (an anti-BACE1 Fab region fused to hinge region (SEQ ID NO:62) and SEQ ID NO:252 (clone CH3C.35.21 with knob and LALA mutations)); (2) heavy chain containing a Fab region having heavy chain variable region of a BACE1-binding antibody, a hinge region, and a modified Fc polypeptide having the “hole” mutations (T366S, L368A, and Y407V according to EU numbering scheme) and the mutations that reduce effector function (L234A and L235A according to EU numbering scheme) (an anti-BACE1 Fab region fused to hinge region (SEQ ID NO:62) and SEQ ID NO:253 (human Fc sequence with hole mutations and LALA mutations)); and (3) two light chain each comprising the light chain variable region of a BACE1-binding antibody.

[0369] Homozygous human TfR knock-in (TfR^{ms/hu} KI) mice were generated to evaluate the Fc polypeptide dimer-Fab fusion proteins in vivo. Briefly, these mice were engineered to replace the mouse TfR with human apical domain/mouse chimeric TfR protein (see Example 2). These mice were dosed with BACE1-Fc dimer^{2XLALAPG} (anti-BACE1 Fab fused to an Fc dimer having LALA mutations and P329G mutation (according to EU numbering scheme) in both Fc polypeptides) or BACE1-3C.35.21^{2XLALA} at 25 mg/kg. Circulating and bone marrow reticulocytes were evaluated 24 hours post-dose by CBC and FACS analysis, respectively. Bone marrow reticulocytes were identified as the Ter119⁺, hCD71^{hi}, and FSC^{low} population. Consistent with previous studies, the Fc polypeptide dimer-Fab fusion, termed “BACE1-3C.35.21^{2XLALA},” did not induce reticulocyte depletion in vivo (FIGS. 1A and 1B), similar to a non-TfR binding Fc polypeptide dimer.

### Example 4. Design of TfR-Binding Fc Polypeptides Having Asymmetric LALA Mutations

[0370] TfR is highly expressed on reticulocytes, which are immature red blood cells present both in bone marrow and in circulation. It has previously been shown that TfR antibodies with full effector function can rapidly deplete reticulocytes in both blood and bone marrow. Thus, the depletion of reticulocytes is a major safety liability for TfR-based antibody therapeutics. However, complete removal of effector function in TfR-based antibodies is not an adequate solution because in some cases, it would be desirable to have effector function triggered upon Fab binding, but not upon TfR binding with an engineered TfR-binding Fc region fused to a therapeutic Fab. Because Fc mutations such as L234A and L235A (LALA) according to EU numbering scheme reduce FcγR binding to the Fc polypeptide dimer, engineered TfR-binding Fc polypeptide dimers fused to Fabs containing such mutations on both Fc polypeptides of the Fc polypeptide dimer are unable to elicit any effector function, with either TfR binding or Fab bound to target.

[0371] An engineered TfR-binding Fc polypeptide dimer fused to a therapeutic Fab that could elicit effector function when the Fab is bound to its target, but not when the TfR-binding site is bound to TfR, is desirable. To this end, Fc polypeptide dimers in which one of the two Fc polypeptides (but not the other) containing mutations that reduce FcγR binding when bound to TfR were developed. A series of TfR-binding Fc polypeptide dimers containing LALA mutations in one, both, or neither Fc polypeptides, fused to antigen-binding Fab regions that bind to either BACE1, human CD20 (hCD20), or mouse CD20 (mCD20), was generated as described in Tables 1 and 2 below. Table 1 describes the mutations in the Fc region of each of the two heavy chains. In all the variants described in Table 1, heavy chain 1 contains the TfR-binding site and the knob mutation T366W (according to EU numbering scheme) in the Fc region, and heavy chain 2 contains the hole mutations T366S, L368A, and Y407V (according to EU numbering scheme) in the Fc region. Variant zz-3C.35.21 does not contain any additional mutations in the Fc regions; variant zz-3C.35.21^{2XLALA} contains LALA mutations in both Fc regions of heavy chains 1 and 2; variant zz-3C.35.21^{cisLALA} contains LALA mutations in the same Fc region as the one that also contains the TfR-binding site (cisLALA or cis configuration); variant zz-3C.35.21^{ransLALA} contains LALA mutations in the Fc region that does not contain the TfR-binding site (transLALA or trans configuration). The same applies to variant zz-3C.35.23, variant zz-3C.35.23^{2XLALA}, variant zz-3C.35.23^{cisLALA}, and variant zz-3C.35.23^{transLALA}.

[0372] Table 2 lists the SEQ ID NO for each heavy chain and light chain of each Fc polypeptide dimer-Fab fusion. For example, BACE1-3C.35.21^{2XLALA} contains the variant zz-3C.35.21^{2XLALA} described in Table 1 and the Fab region that targets BACE1.

TABLE 1
Effector function mutations in Fc polypeptides

| | Heavy chain 1: | |
|---|---|---|
| | TfR-binding Fc | Heavy chain 2: |
| Variant name | (knob) | Fc (hole) |
| zz-3C.35.21 | None | None |
| zz-3C.35.21^{2xLALA} | LALA | LALA |
| zz-3C.35.21^{cisLALA} | LALA | None |
| zz-3C.35.21^{transLALA} | None | LALA |
| zz-3C.35.23 | None | None |
| zz-3C.35.23^{2xLALA} | LALA | LALA |
| zz-3C.35.23^{cisLALA} | LALA | None |
| zz-3C.35.23^{transLALA} | None | LALA |

TABLE 2
SEQ ID NOS for Fc polypeptide dimer-Fab fusions

| | Heavy chain 1 | Light chain 1 | Heavy chain 2 | Light chain 2 |
|---|---|---|---|---|
| BACE1-3C.35.21 | an anti-BACE1 | light chain | an anti-BACE1 | light chain |
| | Fab region | variable region | Fab region | variable region |
| | fused to hinge | of a BACE1- | fused to hinge | of a BACE1- |
| | region (SEQ ID | binding | region (SEQ ID | binding |
| | NO: 62) and | antibody | NO: 62) and | antibody |
| | SEQ ID | | SEQ ID | |
| | NO: 250 | | NO: 251 | |
| BACE1-3C.35.21^{2xLALA} | an anti-BACE1 | light chain | an anti-BACE1 | light chain |
| | Fab region | variable region | Fab region | variable region |
| | fused to hinge | of a BACE1- | fused to hinge | of a BACE1- |
| | region (SEQ ID | binding | region (SEQ ID | binding |
| | NO: 62) and | antibody | NO: 62) and | antibody |
| | SEQ ID | | SEQ ID | |
| | NO: 252 | | NO: 253 | |
| BACE1-3C.35.21^{cisLALA} | an anti-BACE1 | light chain | an anti-BACE1 | light chain |
| | Fab region | variable region | Fab region | variable region |
| | fused to hinge | of a BACE1- | fused to hinge | of a BACE1- |
| | region (SEQ ID | binding | region (SEQ ID | binding |
| | NO: 62) and | antibody | NO: 62) and | antibody |
| | SEQ ID | | SEQ ID | |
| | NO: 252 | | NO: 251 | |
| BACE1-3C.35.21^{transLALA} | an anti-BACE1 | light chain | an anti-BACE1 | light chain |
| | Fab region | variable region | Fab region | variable region |
| | fused to hinge | of a BACE1- | fused to hinge | of a BACE1- |
| | region (SEQ ID | binding | region (SEQ ID | binding |
| | NO: 62) and | antibody | NO: 62) and | antibody |
| | SEQ ID | | SEQ ID | |
| | NO: 250 | | NO: 253 | |
| hCD20-3C.35.21 | SEQ ID | SEQ ID | SEQ ID | SEQ ID |
| | NO: 254 | NO: 258 | NO: 256 | NO: 258 |
| hCD20-3C.35.21^{2xLALA} | SEQ ID | SEQ ID | SEQ ID | SEQ ID |
| | NO: NO: 255 | NO: 258 | NO: 257 | NO: 258 |
| hCD20-3C.35.21^{cisLALA} | SEQ ID | SEQ ID | SEQ ID | SEQ ID |
| | NO: NO: 255 | NO: 258 | NO: 257 | NO: 258 |
| hCD20-3C.35.21^{transLALA} | SEQ ID | SEQ ID | SEQ ID | SEQ ID |
| | NO: 254 | NO: 258 | NO: 256 | NO: 258 |
| mCD20-3C.35.21 | SEQ ID | SEQ ID | SEQ ID | SEQ ID |
| | NO: 259 | NO: 263 | NO: 261 | NO: 263 |
| mCD20-3C.35.21^{2xLALA} | SEQ ID | SEQ ID | SEQ ID | SEQ ID |
| | NO: 260 | NO: 263 | NO: 262 | NO: 263 |
| mCD20-3C.35.21^{cisLALA} | SEQ ID | SEQ ID | SEQ ID | SEQ ID |
| | NO: 260 | NO: 263 | NO: 261 | NO: 263 |
| BACE1-3C.35.23 | an anti-BACE1 | light chain | an anti-BACE1 | light chain |
| | Fab region | variable region | Fab region | variable region |
| | fused to hinge | of a BACE1- | fused to hinge | of a BACE1- |
| | region (SEQ ID | binding | region (SEQ ID | binding |
| | NO: 62) and | antibody | NO: 62) and | antibody |
| | SEQ ID | | SEQ ID | |
| | NO: 237 | | NO: 251 | |
| BACE1-3C.35.23^{2xLALA} | an anti-BACE1 | light chain | an anti-BACE1 | light chain |
| | Fab region | variable region | Fab region | variable region |
| | fused to hinge | of a BACE1- | fused to hinge | of a BACE1- |
| | region (SEQ ID | binding | region (SEQ ID | binding |
| | NO: 62) and | antibody | NO: 62) and | antibody |
| | SEQ ID | | SEQ ID | |
| | NO: 238 | | NO: 253 | |
| BACE1-3C.35.23^{cisLALA} | an anti-BACE1 | light chain | an anti-BACE1 | light chain |
| | Fab region | variable region | Fab region | variable region |
| | fused to hinge | of a BACE1- | fused to hinge | of a BACE1- |
| | region (SEQ ID | binding | region (SEQ ID | binding |
| | NO: 62) and | antibody | NO: 62) and | antibody |
| | SEQ ID | | SEQ ID | |
| | NO: 238 | | NO: 251 | |
| BACE1-3C.35.23^{transLALA} | an anti-BACE1 | light chain | an anti-BACE1 | light chain |
| | Fab region | variable region | Fab region | variable region |
| | fused to hinge | of a BACE1- | fused to hinge | of a BACE1- |
| | region (SEQ ID | binding | region (SEQ ID | binding |
| | NO: 62) and | antibody | NO: 62) and | antibody |
| | SEQ ID | | SEQ ID | |
| | NO: 237 | | NO: 253 | |
| hCD20-3C.35.23 | SEQ ID | SEQ ID | SEQ ID | SEQ ID |
| | NO: 410 | NO: 258 | NO: 256 | NO: 258 |
| hCD20-3C.35.23^{2xLALA} | SEQ ID | SEQ ID | SEQ ID | SEQ ID |
| | NO: NO: 411 | NO: 258 | NO: 257 | NO: 258 |
| hCD20-3C.35.23^{cisLALA} | SEQ ID | SEQ ID | SEQ ID | SEQ ID |
| | NO: NO: 411 | NO: 258 | NO: 257 | NO: 258 |
| hCD20-3C.35.23^{transLALA} | SEQ ID | SEQ ID | SEQ ID | SEQ ID |
| | NO: 410 | NO: 258 | NO: 256 | NO: 258 |
| mCD20-3C.35.23 | SEQ ID | SEQ ID | SEQ ID | SEQ ID |
| | NO: 412 | NO: 263 | NO: 261 | NO: 263 |
| mCD20-3C.35.23^{2xLALA} | SEQ ID | SEQ ID | SEQ ID | SEQ ID |
| | NO: 413 | NO: 263 | NO: 262 | NO: 263 |
| mCD20-3C.35.23^{cisLALA} | SEQ ID | SEQ ID | SEQ ID | SEQ ID |
| | NO: 413 | NO: 263 | NO: 261 | NO: 263 |

### Example 5. TfR-Binding Polypeptides Having Cis Configuration Attenuate Reticulocyte Depletion in Mice

[0373] To determine whether an Fc polypeptide dimer having the cis configuration or the trans configuration could attenuate reticulocyte depletion, we treated homozygous human TfR knock-in (TfR^{ms/hu} KI) mice with these Fc polypeptide dimers, as well as the wild-type human IgG (hIgG) counterpart, and analyzed reticulocytes from both the peripheral blood and the bone marrow in these animals. Circulating reticulocytes were quantified from peripheral blood using the Advia 120 Hematology System. Briefly, cells were stained with the ADVIA autoRETIC reagent and reticulocytes were identified based on RNA content and differential light absorption. For bone marrow reticulocytes, bone marrow cells were harvested from the femur of each animal, blocked with Fc-blocker (anti-mouse CD16/CD32), stained with anti-mTer119 and anti-hCD71, and analyzed by fluorescence-activated cell sorting (FACS). Reticulocytes were gated as the mTer119⁺, hCD71^{hi}, and FSC^{low} populations using the FlowJo analysis software. Upon analysis, the Fc polypeptide dimer having the cis configuration (i.e., only one Fc polypeptide contains both the TfR-binding site and the LALA mutations, while the other Fc polypeptide contains neither the TfR-binding site nor the LALA mutations) mitigated reticulocyte loss in both blood and bone marrow that was otherwise seen in the wild-type hIgG control and the Fc polypeptide dimer having the trans configuration (i.e., one Fc polypeptide contains the TfR-binding site and the other Fc polypeptide contains the LALA mutations). Remarkably, the Fc polypeptide dimer with the cis configuration at 25 mg/kg does not possess the major safety liability that is normally seen in TfR-binding polypeptides with effector function (FIGS. 2A and 2B). Furthermore, the system was stressed with a higher dose at 50 mg/kg, using a TfR-binding polypeptide with lower TfR affinity. Although the cis configuration partially attenuated blood reticulocyte loss, bone marrow reticulocyte loss, which is more reflective of clinical safety, was spared (FIGS. 2C and 2D). On the other hand, the Fc polypeptide dimer having the trans configuration depleted blood and bone marrow reticulocytes in a similar magnitude as the wild-type IgG control. These results demonstrate that the Fc polypeptide dimer with the cis configuration is able to mitigate reticulocyte loss in vivo.

### Example 6. TfR-Binding Polypeptides Having Cis Configuration Attenuate TfR-Mediated ADCC Activity In Vitro

[0374] It was determined that the lack of reticulocyte loss in vivo by the Fc polypeptide dimer having the cis configuration is due to its inability to elicit TfR-mediated ADCC. Ramos cells, which express high levels of human TfR, were used as the target cells in an in vitro ADCC assay. The target cells were plated at 10,000 cells/well and opsonized with (1) hIgG1 with TfR-binding site, (2) hIgG1 with TfR-binding site and with LALA mutations in both Fc polypeptides, and (3) hIgG1 with an Fc polypeptide dimer having the cis configuration for 30 minutes. Effector natural killer (NK) cells were isolated from human peripheral blood, incubated overnight with IL-21 (20 ng/mL), and incubated with target cells at 25:1 effector:target cells ratio (250,000 cells/well) for 4 h. Cytotoxicity was evaluated by LDH expression, normalized to the control without any polypeptides, and calculated as the percentage of maximum lysis in target cells. Because effector immune cells, in this case natural killer cells, express FcγRs, the Fc portion of a wild-type IgG1 would bind to FcγRs and trigger an ADCC response. Indeed, the hIgG1 with TfR-binding site elicited a robust ADCC response, while both the hIgG1 with LALA mutations in both Fc polypeptides, and the hIgG1 with an Fc polypeptide dimer having the cis configuration did not. This data is consistent with the in vivo reticulocytes data: Fc polypeptide dimer having the cis configuration and Fc polypeptide dimer having the TfR-binding site and LALA mutations on both Fc polypeptides (at two different TfR affinities: FIG. 3A: CH3C.35.21; FIG. 3B: CH3C.35.23) prevent TfR-mediated ADCC and hence mitigated reticulocyte depletion.

### Example 7. TfR-Binding Polypeptides Prevent TfR-Mediated In Vitro CDC Activity

[0375] Reticulocyte loss in vivo by antibodies that bind to TfR could also be contributed by TfR-mediated CDC. Interestingly, the Fc polypeptide dimer that binds to TfR is unable to elicit CDC, likely due to its inability to sterically form polypeptide hexamers to trigger a complement response. CHO cells that were engineered to overexpress TfR (CHO-hTfR) were plated at 200,000 cells/well in serum-free media. The cells were opsonized with (1) control hIgG, (2) Ab204 (an anti-TfR positive control antibody), and (3) hIgG1 with TfR-binding site for 30 minutes. 50 μl it of diluted baby rabbit serum was added to each well and cells were incubated for 4 h. Cytotoxicity was evaluated by LDH expression, normalized to the control without any polypeptides, and calculated as the percentage of maximum lysis in target cells. Indeed, while anti-TfR Ab204 was able to induce CDC in CHO-hTfR cells, hIgG1 with TfR-binding site at the Fc region had no effect on CDC (FIG. 4).

### Example 8. TfR-Binding Polypeptides Having Cis Configuration Stimulate pSyk Activity in Primary Human Microglia

[0376] It was confirmed that the modified Fc polypeptide dimer has a functional Fc as determined by FcγR-induced phosphorylated-spleen tyrosine kinase (pSYK) activity, using primary human microglial cells. FcγRs on effector immune cells normally bind to the Fc region of an antibody to trigger a number of responses important for innate immunity. One of those responses include the Syk tyrosine kinase signaling pathway, which plays a critical role in immune cell activation such as phagocytosis, cytokine release, and ADCC (DeFranco et al., J. of Exp Med., 1997, 186(7):1027-39). When FcγRs of an immune cell bind to an immune complex, the immunoreceptor tyrosine-based activation motif (ITAM) enables Syk kinase to be recruited and phosphorylated by the Src family kinases, which results in downstream signaling pathways that trigger immune cell activation (Hirose et al., J of Biol Chem, 2004, 279:32308-15). Thus, pSyk is used as a readout for FcγR-induced immune cell activation. Microglial cells from a mixed glial culture derived from human fetal tissue were harvested and were used to evaluate pSyk activity in human microglial cells upon binding to TfR-binding polypeptides. Microglia were then added onto a TfR-binding polypeptides-coated 96-well plate, incubated at 37° C. for 10 min, lysed, and quantified for the levels of pSyk using a pSyk sandwich immunoassay. Even though the cis-LALA mutation did not elicit TfR-mediated ADCC, it was able to elicit a pSyk response in human microglial cells similar to the wild-type IgG peptide (about 3 fold increase from the LALA mutation control, FIG. 5). This result demonstrates that the modified Fc polypeptide dimer having the cis configuration retains its Fc function and could have effector function.

### Example 9. TfR-Binding Polypeptides Having Cis Configuration Elicit Fab-Mediated ADCC and CDC in Target Cells

[0377] In addition to pSYK activity induction, the ability of TfR-binding polypeptides with the cis configuration to elicit Fab-mediated ADCC and CDC was evaluated. Target cells that express mouse CD20 (A20 cell line) were used to evaluate Fab-mediated ADCC. Similar to TfR-mediated ADCC described in Example 8, target cells were plated at 10,000 cells/well, opsonized, incubated with NK cells at 25:1 effector:target cells ratio, and evaluated for cytotoxicity by LDH expression. Target cells were opsonized with (1) control hIgG, (2) anti-mCD20 antibody, (3) hIgG1 with TfR-binding site and mCD20 Fab binding site (CH3C.35.21 hIgG1:α-mCD20 (WT)), and (4) hIgG1 with an Fc polypeptide dimer having the cis configuration and mCD20 Fab binding site (CH3C.35.21 hIgG1:α-mCD20 (cis-LALA)). The assay is designed to evaluate solely Fab binding since the target cells do not express human TfR. Consistent with pSYK activity induction, hIgG1 with an Fc polypeptide dimer having the cis configuration and mCD20 Fab binding site elicited ADCC similar to anti-mCD20 antibody and hIgG1 with TfR-binding site and mCD20 Fab binding site (FIG. 6A).

[0378] In addition to ADCC, CDC was also evaluated. Raji cells have previously been shown to be sensitive in anti-hCD20-mediated CDC; therefore, they were used as target cells to evaluate hIgG1 with TfR-binding site and hCD20 Fab binding site. Raji cells are plated at 200,000 cells/well in serum-free media and opsonized with (1) control hIgG, (2) anti-hCD20 antibody, (3) hIgG1 with TfR-binding site and hCD20 Fab binding site (CH3C.35.21 hIgG1:α-hCD20 (WT)), and (4) hIgG1 with an Fc polypeptide dimer having the cis configuration and hCD20 Fab binding site (CH3C.35.21 hIgG1:α-hCD20 (cis-LALA)) for 30 minutes. 50 μL of diluted baby rabbit serum was added to each well and cells were incubated for 4 h. Cytotoxicity was evaluated by LDH expression, normalized to the control without any polypeptides, and calculated as the percentage of maximum lysis in target cells. Similar to Fab-mediated ADCC, hIgG1 with an Fc polypeptide dimer having the cis configuration and hCD20 Fab binding site elicited CDC to the same degree as anti-hCD20 and hIgG1 with TfR-binding site and hCD20 Fab binding site (FIG. 6B). Taken together, these functional in vitro cytotoxicity assays demonstrate that hIgG1 with an Fc polypeptide dimer having the cis configuration does not interfere with its ability to elicit Fab-mediated effector function.

### Example 10. TfR-Binding Polypeptides Having Cis Configuration and mCD20 Fab Binding Site Elicit Effector Function In Vivo

[0379] As demonstrated in in vivo safety analysis, hIgG1 with an Fc polypeptide dimer having the cis configuration mitigated reticulocyte loss upon binding to TfR. We then tested whether this configuration could elicit Fab-mediated effector function in vivo, which is essential to induce a therapeutic response. Antibodies against mCD20 have previously been demonstrated to severely deplete peripheral and splenic B cells in vivo and have therefore been utilized to evaluate Fab-mediated effector function. The ability of hIgG1 with an Fc polypeptide dimer having the cis configuration and mCD20 Fab binding site to deplete blood and splenic B cells was evaluated in WT mice, and compared to the response observed in anti-mCD20 antibody and hIgG1 with TfR-binding site and mCD20 Fab binding site. WT mice were treated at 25 mg/kg with (1) control IgG, (2) anti-mCD20 antibody, (3) hIgG1 with TfR-binding site and mCD20 Fab binding site (CH3C.35.21 hIgG1:α-mCD20 (WT)), (4) hIgG1 with TfR-binding site and with LALA mutations in both Fc polypeptides and mCD20 Fab binding site (CH3C.35.21 hIgG1:α-mCD20 (LALA)), and (5) hIgG1 with an Fc polypeptide dimer having the cis configuration and mCD20 Fab binding site (CH3C.35.21 hIgG1:α-mCD20 (cis-LALA)). Mature peripheral B cells and splenic B cells were evaluated on Day 1 and Day 5, respectively. Briefly, peripheral blood and spleen were harvested. Cells from peripheral blood and splenocytes were treated with ACK lysis buffer, incubated with Fc blocker, and stained with anti-B220 and anti-IgM. Mature B cells were identified as the B220^{high}IgM^{high} population upon FACS analysis. Consistent with Fab-mediated in vitro ADCC and CDC assays, hIgG1 with an Fc polypeptide dimer having the cis configuration and mCD20 Fab binding site elicited robust B cell depletion similar to the anti-mCD20 antibody and hIgG1 with TfR-binding site and mCD20 Fab binding site (FIGS. 7A and 7B). These results demonstrate that the modified Fc polypeptide dimer having the cis configuration retains its Fc function and has Fab-mediated effector function in vivo.

### Example 11. Modified Fc Polypeptides that Bind to TfR

[0380] This example describes modifications to Fc polypeptides to confer TfR binding and transport across the BBB.

[0381] Unless otherwise indicated, the positions of amino acid residues in this section are numbered based on EU index numbering for a human IgG1 wild-type Fc region.

### Generation and Characterization of Fc Polypeptides Comprising Modifications at Positions 384, 386, 387, 388, 389, 390, 413, 416, and 421 (CH3C Clones)

[0382] Yeast libraries containing Fc regions having modifications introduced into positions including amino acid positions 384, 386, 387, 388, 389, 390, 413, 416, and 421 were generated as described below. Illustrative clones that bind to TfR are shown in Tables 3 and 4.

[0383] After an additional two rounds of sorting, single clones were sequenced and four unique sequences were identified. These sequences had a conserved Trp at position 388, and all had an aromatic residue (i.e., Trp, Tyr, or His) at position 421. There was a great deal of diversity at other positions.

[0384] The four clones selected from the library were expressed as Fc fusions to Fab fragments in CHO or 293 cells, and purified by Protein A and size-exclusion chromatography, and then screened for binding to human TfR in the presence or absence of holo-Tf by ELISA. The clones all bound to human TfR and the binding was not affected by the addition of excess (5 μM) holo-Tf. Clones were also tested for binding to 293F cells, which endogenously express human TfR. The clones bound to 293F cells, although the overall binding was substantially weaker than the high-affinity positive control.

[0385] Next, it was tested whether clones could internalize in TfR-expressing cells using clone CH3C.3 as a test clone. Adherent HEK 293 cells were grown in 96-well plates to about 80% confluence, media was removed, and samples were added at 1 μM concentrations: clone CH3C.3, anti-TfR benchmark positive control antibody (Ab204), anti-BACE1 benchmark negative control antibody (Ab107), and human IgG isotype control (obtained from Jackson Immunoresearch). The cells were incubated at 37° C. and 8% CO₂ concentration for 30 minutes, then washed, permeabilized with 0.1% Triton™ X-100, and stained with anti-human-IgG-Alexa Fluor® 488 secondary antibody. After additional washing, the cells were imaged under a high content fluorescence microscope (i.e., an Opera Phenix™ system), and the number of puncta per cell was quantified. At 1 μM, clone CH3C.3 showed a similar propensity for internalization to the positive anti-TfR control, while the negative controls showed no internalization.

### Further Engineering of Clones

[0386] Additional libraries were generated to improve the affinity of the initial hits against human TfR using a soft randomization approach, wherein DNA oligos were generated to introduce soft mutagenesis based on each of the original four hits. Additional clones were identified that bound TfR and were selected. The selected clones fell into two general sequence groups. Group 1 clones (i.e., clones CH3C.18, CH3C.21, CH3C.25, and CH3C.34) had a semi-conserved Leu at position 384, a Leu or His at position 386, a conserved and a semi-conserved Val at positions 387 and 389, respectively, and a semi-conserved P-T-W motif at positions 413, 416, and 421, respectively. Group 2 clones had a conserved Tyr at position 384, the motif TXWSX at positions 386-390, and the conserved motif S/T-E-F at positions 413, 416, and 421, respectively. Clones CH3C.18 and CH3C.35 were used in additional studies as representative members of each sequence group.

### Epitope Mapping

[0387] To determine whether the engineered Fc regions bound to the apical domain of TfR, TfR apical domain was expressed on the surface of phage. To properly fold and display the apical domain, one of the loops had to be truncated and the sequence needed to be circularly permuted. Clones CH3C.18 and CH3C.35 were coated on ELISA plates and a phage ELISA protocol was followed. Briefly, after washing and blocking with 1% PBSA, dilutions of phage displaying were added and incubated at room temperature for 1 hour. The plates were subsequently washed and anti-M13-HRP was added, and after additional washing the plates were developed with TMB substrate and quenched with 2N H₂SO₄. Both clones CH3C.18 and CH3C.35 bound to the apical domain in this assay.

### Paratope Mapping

[0388] To understand which residues in the Fc domain were most important for TfR binding, a series of mutant clone CH3C.18 and clone CH3C.35 Fc regions was created in which each mutant had a single position in the TfR binding register mutated back to wild-type. The resulting variants were expressed recombinantly as Fab-Fc fusions and tested for binding to human or cyno TfR. For clone CH3C.35, positions 388 and 421 were important for binding; reversion of either of these to wild-type completely ablated binding to human TfR.

### Binding Characterization of Maturation Clones

[0389] Binding ELISAs were conducted with purified Fab-Fc fusion variants with human or cyno TfR coated on the plate, as described above. The variants from the clone CH3C.18 maturation library, clone CH3C.3.2-1, clone CH3C.3.2-5, and clone CH3C.3.2-19, bound human and cyno TfR with approximately equivalent EC₅₀ values, whereas the parent clones CH3C.18 and CH3C.35 had greater than 10-fold better binding to human versus cyno TfR.

[0390] Next, it was tested whether the modified Fc polypeptides internalized in human and monkey cells. Using the protocol described above, internalization in human HEK 293 cells and rhesus LLC-MK2 cells was tested. The variants that similarly bound human and cyno TfR, clones CH3C.3.2-5 and CH3C.3.2-19, had significantly improved internalization in LLC-MK2 cells as compared with clone CH3C.35.

### Additional Engineering of Clones

[0391] Additional engineering to further affinity mature clones CH3C.18 and CH3C.35 involved adding additional mutations to the positions that enhanced binding through direct interactions, second-shell interactions, or structure stabilization. This was achieved via generation and selection from an “NNK walk” or “NNK patch” library. The NNK walk library involved making one-by-one NNK mutations of residues that are near to the paratope. By looking at the structure of Fc bound to FcγRI (PDB ID: 4W4O), 44 residues near the original modification positions were identified as candidates for interrogation. Specifically, the following residues were targeted for NNK mutagenesis: K248, R255, Q342, R344, E345, Q347, T359, K360, N361, Q362, S364, K370, E380, E382, S383, G385, Y391, K392, T393, D399, S400, D401, S403, K409, L410, T411, V412, K414, S415, Q418, Q419, G420, V422, F423, S424, S426, Q438, S440, S442, L443, S444, P4458, G446, and K447. The 44 single point NNK libraries were generated using Kunkel mutagenesis, and the products were pooled and introduced to yeast via electroporation, as described above for other yeast libraries.

[0392] The combination of these mini-libraries (each of which had one position mutated, resulting in 20 variants) generated a small library that was selected using yeast surface display for any positions that lead to higher affinity binding. Selections were performed as described above, using TfR apical domain proteins. After three rounds of sorting, clones from the enriched yeast library were sequenced, and several “hot-spot” positions were identified where certain point mutations significantly improved the binding to apical domain proteins. For clone CH3C.35, these mutations included E380 (mutated to Trp, Tyr, Leu, or Gln) and 5415 (mutated to Glu). The sequences of the clone CH3C.35 single and combination mutants are set forth in SEQ ID NOS:21-23, 64-69, and 125-127. For clone CH3C.18, these mutations included E380 (mutated to Trp, Tyr, or Leu) and K392 (mutated to Gln, Phe, or His). The sequences of the clone CH3C.18 single mutants are set forth in SEQ ID NOS:70-75.

### Additional Maturation Libraries to Improve Clone CH3C.35 Affinity

[0393] An additional library to identify combinations of mutations from the NNK walk library, while adding several additional positions on the periphery of these, was generated as described for previous yeast libraries. In this library, the YxTEWSS (SEQ ID NO:414) and TxxExxxxF (SEQ ID NO:415) motifs were kept constant, and six positions were completely randomized: E380, K392, K414, 5415, 5424, and 5426. Positions E380 and 5415 were included because they were “hot spots” in the NNK walk library. Positions K392, S424, and S426 were included because they make up part of the core that may position the binding region, while K414 was selected due to its adjacency to position 415.

[0394] This library was sorted, as previously described, with the cyno TfR apical domain only. The enriched pool was sequenced after five rounds, and the sequences of the modified regions of the identified unique clones are set forth in SEQ ID NOS:76-93.

[0395] The next libraries were designed to further explore acceptable diversity in the main binding paratope. Each of the original positions (384, 386, 387, 388, 389, 390, 413, 416, and 421) plus the two hot spots (380 and 415) were individually randomized with NNK codons to generate a series of single-position saturation mutagenesis libraries on yeast. In addition, each position was individually reverted to the wild-type residue, and these individual clones were displayed on yeast. It was noted that positions 380, 389, 390, and 415 were the only positions that retained substantial binding to TfR upon reversion to the wild-type residue (some residual but greatly diminished binding was observed for reversion of 413 to wild-type).

[0396] The single-position NNK libraries were sorted for three rounds against the human TfR apical domain to collect the top ˜5% of binders, and then at least 16 clones were sequenced from each library. The results indicate what amino acids at each position can be tolerated without significantly reducing binding to human TfR, in the context of clone CH3C.35. A summary is below:

### Position 380: Trp, Leu, or Glu;

### Position 384: Tyr or Phe;

[0397] Position 386: Thr only;
Position 387: Glu only;
Position 388: Trp only;
Position 389: Ser, Ala, or Val (although the wild type Asn residue seems to retain some binding, it did not appear following library sorting);

### Position 390: Ser or Asn;

### Position 413: Thr or Ser;

### Position 415: Glu or Ser;

[0398] Position 416: Glu only; and
Position 421: Phe only.

[0399] The above residues, when substituted into clone CH3C.35 as single changes or in combinations, represent paratope diversity that retains binding to TfR apical domain. Clones having mutations at these positions include those shown in Table 4, and the sequences of the CH3 domains of these clones are set forth in SEQ ID NOS:65-69, 92, 94-124, and 268-274.

### Example 12. Methods

### Generation of Phage-Display Libraries

[0400] A DNA template coding for the wild-type human Fc sequence was synthesized and incorporated into a phagemid vector. The phagemid vector contained an ompA or pelB leader sequence, the Fc insert fused to c-Myc and 6×His (SEQ ID NO:421) epitope tags, and an amber stop codon followed by M13 coat protein pIII.

[0401] Primers containing “NNK” tricodons at the desired positions for modifications were generated, where N is any DNA base (i.e., A, C, G, or T) and K is either G or T. Alternatively, primers for “soft” randomization were used, where a mix of bases corresponding to 70% wild-type base and 10% of each of the other three bases was used for each randomization position. Libraries were generated by performing PCR amplification of fragments of the Fc region corresponding to regions of randomization and then assembled using end primers containing SfiI restriction sites, then digested with SfiI and ligated into the phagemid vectors. Alternatively, the primers were used to conduct Kunkel mutagenesis. The ligated products or Kunkel products were transformed into electrocompetent E. coli cells of strain TG1 (obtained from Lucigen). The E. coli cells were infected with M13K07 helper phage after recovery and grown overnight, after which library phage were precipitated with 5% PEG/NaCl, resuspended in 15% glycerol in PBS, and frozen until use. Typical library sizes ranged from about 10⁹ to about 10¹¹ transformants. Fc-dimers were displayed on phage via pairing between pIII-fused Fc and soluble Fc not attached to pIII (the latter being generated due to the amber stop codon before pIII).

### Generation of Yeast-Display Libraries

[0402] A DNA template coding for the wild-type human Fc sequence was synthesized and incorporated into a yeast display vector. For CH2 and CH3 libraries, the Fc polypeptides were displayed on the Aga2p cell wall protein. Both vectors contained prepro leader peptides with a Kex2 cleavage sequence, and a c-Myc epitope tag fused to the terminus of the Fc.

[0403] Yeast display libraries were assembled using methods similar to those described for the phage libraries, except that amplification of fragments was performed with primers containing homologous ends for the vector. Freshly prepared electrocompetent yeast (i.e., strain EBY100) were electroporated with linearized vector and assembled library inserts. Electroporation methods will be known to one of skill in the art. After recovery in selective SD-CAA media, the yeast were grown to confluence and split twice, then induced for protein expression by transferring to SG-CAA media. Typical library sizes ranged from about 10⁷ to about 10⁹ transformants. Fc-dimers were formed by pairing of adjacently displayed Fc monomers.

### General Methods for Phage Selection

[0404] Phage methods were adapted from Phage Display: A Laboratory Manual (Barbas, 2001). Additional protocol details can be obtained from this reference.

### Plate Sorting Methods

[0405] Human TfR target was coated on MaxiSorp® microtiter plates (typically 200 μL at 1-10 μg/mL in PBS) overnight at 4° C. All binding was done at room temperature unless otherwise specified. The phage libraries were added into each well and incubated overnight for binding. Microtiter wells were washed extensively with PBS containing 0.05% Tween® 20 (PBST) and bound phage were eluted by incubating the wells with acid (typically 50 mM HCl with 500 mM KCl, or 100 mM glycine, pH 2.7) for 30 minutes. Eluted phage were neutralized with 1 M Tris (pH 8) and amplified using TG1 cells and M13/K07 helper phage and grown overnight at 37° C. in 2YT media containing 50 μg/mL carbenacillin and 50 μg/mL Kanamycin. The titers of phage eluted from a target-containing well were compared to titers of phage recovered from a non-target-containing well to assess enrichment. Selection stringency was increased by subsequently decreasing the incubation time during binding and increasing washing time and number of washes.

### Bead Sorting Methods

[0406] Antigen was biotinylated through free amines using NHS-PEG4-Biotin (obtained from Pierce™). For biotinylation reactions, a 3- to 5-fold molar excess of biotin reagent was used in PBS. Reactions were quenched with Tris followed by extensive dialysis in PBS. The biotinylated antigen was immobilized on streptavidin-coated magnetic beads, (i.e., M280-streptavidin beads obtained Thermo Fisher). The phage display libraries were incubated with the antigen-coated beads at room temperature for 1 hour. The unbound phage were then removed and beads were washed with PBST. The bound phage were eluted by incubating with 50 mM HCl containing 500 mM KCl (or 0.1 M glycine, pH 2.7) for 30 minutes, and then neutralized and propagated as described above for plate sorting.

[0407] After three to five rounds of panning, single clones were screened by either expressing Fc on phage or solubly in the E. coli periplasm. Such expression methods will be known to one of skill in the art. Individual phage supernatants or periplasmic extracts were exposed to blocked ELISA plates coated with antigen or a negative control and were subsequently detected using HRP-conjugated goat anti-Fc (obtained from Jackson Immunoresearch) for periplasmic extracts or anti-M13 (GE Healthcare) for phage, and then developed with TMB reagent (obtained from Thermo Fisher). Wells with OD₄₅₀ values greater than around 5-fold over background were considered positive clones and sequenced, after which some clones were expressed either as a soluble Fc fragment or fused to Fab fragments.

### General Methods for Yeast Selection

### Bead Sorting (Magnetic-Assisted Cell Sorting (MACS)) Methods

[0408] MACS and FACS selections were performed similarly to as described in Ackerman, et al. 2009 Biotechnol. Prog. 25(3), 774. Streptavidin magnetic beads (e.g., M-280 streptavidin beads from Thermo Fisher) were labeled with biotinylated antigen and incubated with yeast (typically 5-10× library diversity). Unbound yeast were removed, the beads were washed, and bound yeast were grown in selective media and induced for subsequent rounds of selection.

### Fluorescence-Activated Cell Sorting (FACS) Methods

[0409] Yeast were labeled with anti-c-Myc antibody to monitor expression and biotinylated antigen (concentration varied depending on the sorting round). In some experiments, the antigen was pre-mixed with streptavidin-Alexa Fluor® 647 in order to enhance the avidity of the interaction. In other experiments, the biotinylated antigen was detected after binding and washing with streptavidin-Alexa Fluor® 647. Singlet yeast with binding were sorted using a FACS Aria III cell sorter. The sorted yeast were grown in selective media then induced for subsequent selection rounds.

[0410] After an enriched yeast population was achieved, yeast were plated on SD-CAA agar plates and single colonies were grown and induced for expression, then labeled as described above to determine their propensity to bind to the target. Positive single clones were subsequently sequenced for binding antigen, after which some clones were expressed either as a soluble Fc fragment or as fused to Fab fragments.

### General Methods for Screening

### Screening by ELISA

[0411] Clones were selected from panning outputs and grown in individual wells of 96-well deep-well plates. The clones were either induced for periplasmic expression using autoinduction media (obtained from EMD Millipore) or infected with helper phage for phage-display of the individual Fc variants on phage. The cultures were grown overnight and spun to pellet E. coli. For phage ELISA, phage containing supernatant was used directly. For periplasmic expression, pellets were resuspended in 20% sucrose, followed by dilution at 4:1 with water, and shaken at 4° C. for 1 hour. Plates were spun to pellet the solids and supernatant was used in the ELISA.

[0412] ELISA plates were coated with antigen, typically at 0.5 mg/mL overnight, then blocked with 1% BSA before addition of phage or periplasmic extracts. After a 1-hour incubation and washing off unbound protein, HRP-conjugated secondary antibody was added (i.e., anti-Fc or anti-M13 for soluble Fc or phage-displayed Fc, respectively) and incubated for 30 minutes. The plates were washed again, and then developed with TMB reagent and quenched with 2N sulfuric acid. Absorbance at 450 nm was quantified using a plate reader (BioTek®) and binding curves were plotted using Prism software where applicable. Absorbance signal for tested clones was compared to negative control (phage or paraplasmic extract lacking Fc). In some assays, soluble transferrin or other competitor was added during the binding step, typically at significant molar excess (greater than 10-fold excess).

### Screening by Flow Cytometry

[0413] Fc variant polypeptides (expressed either on phage, in periplasmic extracts, or solubly as fusions to Fab fragments) were added to cells in 96-well V-bottom plates (about 100,000 cells per well in PBS+1% BSA (PBSA)), and incubated at 4° C. for 1 hour. The plates were subsequently spun and the media was removed, and then the cells were washed once with PBSA. The cells were resuspended in PBSA containing secondary antibody (typically goat anti-human-IgG-Alexa Fluor® 647 (obtained from Thermo Fisher)). After 30 minutes, the plates were spun and the media was removed, the cells were washed 1-2 times with PBSA, and then the plates were read on a flow cytometer (i.e., a FACSCanto™ II flow cytometer). Median fluorescence values were calculated for each condition using FlowJo software and binding curves were plotted with Prism software.

### Example 13. Construction of CH3C.18 Variants

[0414] This example describes the construction of a library of CH3C.18 variants.

[0415] Single clones were isolated, and grown overnight in SG-CAA media supplemented with 0.2% glucose overnight to induce surface expression of CH3C.18 variants. For each clone, two million cells were washed three times in PBS+0.5% BSA at pH 7.4. Cells were stained with biotinylated target, 250 nM human TfR, 250 nM cyno TfR, or 250 nM of an unrelated biotinylated protein for 1 hour at 4° C. with shaking, then washed twice with the same buffer. Cells were stained with nuetravidin-Alexafluor647 (AF647) for 30 minutes at 4° C., then washed twice again. Expression was measured using anti-c-myc antibody with anti-chicken-Alexfluor488 (AF488) secondary antibody. Cells were resuspended, and median fluorescence intensity (MFI) of AF647 and AF488 was measured on a BD FACS CantoII. MFI was calculated for the TfR-binding population for each population and plotted with human TfR, cyno TfR, or control binding.

[0416] Table 5 shows the library of CH3C.18 variants. Each row represents a variant that contains the indicated amino acid substitutions at each position and the amino acids at the rest of the positions are the same as those in CH3C.18. The positions shown in Table 5 are numbered according to the EU numbering scheme.

TABLE 5
CH3C.18 Variants

| Position | 384 | 386 | 387 | 389 | 390 | 391 | 413 | 416 | 421 |
|---|---|---|---|---|---|---|---|---|---|
| Wild-type Fc | N | Q | P | N | N | Y | D | R | N |
| CH3C.4 (CH3C.18.1) | V | T | P | A | L | Y | L | E | W |
| CH3C.2 (CH3C.18.2) | Y | T | V | S | H | Y | S | E | Y |
| CH3C.3 (CH3C.18.3) | Y | T | E | S | Q | Y | E | D | H |
| CH3C.1 (CH3C.18.4) | L | L | V | V | G | Y | A | T | W |
| CH3C.18 (CH3C.18.1.18) | L | H | V | A | V | Y | P | T | W |
| CH3C.3.1-3 (CH3C.18.3.1-3) | L | H | V | V | A | T | P | T | W |
| CH3C.3.1-9 (CH3C.18.3.1-9) | L | P | V | V | H | T | P | T | W |
| CH3C.3.2-1 (CH3C.18.3.2-1) | L | H | V | V | N | F | P | T | W |
| CH3C.3.2-5 (CH3C.18.3.2-5) | L | H | V | V | D | Q | P | T | W |
| CH3C.3.2-19 (CH3C.18.3.2- | L | H | V | V | N | Q | P | T | W |
| 19) | | | | | | | | | |
| CH3C.3.4-1 (CH3C.18.3.4-1) | W | F | V | S | T | T | P | N | F |
| CH3C.3.4-19 (CH3C.18.3.4- | W | H | V | S | T | T | P | N | Y |
| 19) | | | | | | | | | |
| CH3C.3.2-3 (CH3C.18.3.2-3) | L | H | V | V | E | Q | P | T | W |
| CH3C.3.2-14 (CH3C.18.3.2- | L | H | V | V | G | V | P | T | W |
| 14) | | | | | | | | | |
| CH3C.3.2-24 (CH3C.18.3.2- | L | H | V | V | H | T | P | T | W |
| 24) | | | | | | | | | |
| CH3C.3.4-26 (CH3C.18.3.4- | W | T | V | G | T | Y | P | N | Y |
| 26) | | | | | | | | | |
| CH3C.3.2-17 (CH3C.18.3.2- | L | H | V | V | G | T | P | T | W |
| 17) | | | | | | | | | |

### Example 14. TfR-Binding Polypeptides Having Cis Configuration and Fabs that Bind Amyloid Beta (Aβ) Effectively Cross the BBB and Elicit Robust Effector Function, Leading to Microglial Recruitment to Aβ Plaques and Plaque Reduction in an Aβ Plaque Mouse Model

[0417] To provide additional evidence that TfR-binding polypeptides having cis configuration could be used in a therapeutically relevant disease model, we evaluated TfR-binding Fc polypeptides having the cis configuration possessing Fab that bind Aβ in an Aβ plaque depositing mouse model. In particular, these polypeptides were evaluated for the ability to recruit microglia to Aβ plaques. Briefly, animals (3.5 months old) were treated at 50 mg/kg intraperitoneally on Days 0, 3, 6, and 9 in the following groups: 1) TfR^{ms/hu} KI mice treated with control IgG (n=6), 2) 5XFAD×TfR_{ms/hu} KI mice treated with control IgG (n=11), 3) 5XFAD×TfR^{ms/hu} KI mice treated with anti-Aβ (α-Aβ) (n=12), 4) 5XFAD×TfR^{ms/hu} KI mice treated with TfR-binding Fc polypeptides having the cis configuration and Aβ Fab binding site (n=12), and 5) 5XFAD×TfR^{ms/hu} KI mice treated with TfR-binding Fc polypeptides having LALA mutations on both Fc polypeptides (n=12). Table 6 lists the SEQ ID NO for each heavy chain and light chain of each Fc polypeptide dimer-Fab fusion.

TABLE 6
SEQ ID NOS for Fc polypeptide dimer-Fab fusions

| | Heavy chain 1 | Light chain 1 | Heavy chain 2 | Light chain 2 |
|---|---|---|---|---|
| anti-Aβ-Fc polypeptides | SEQ ID NO: 416 | SEQ ID NO: 420 | SEQ ID NO: 416 | SEQ ID NO: 420 |
| | (an anti-Aβ | (light chain | (an anti-Aβ | (light chain |
| | Fab region | of anti-Aβ | Fab region | of anti-Aβ |
| | fused to hinge | Fab region) | fused to hinge | Fab region) |
| | region and | | region and | |
| | wild-type human | | wild-type human | |
| | Fc polypeptide) | | Fc polypeptide) | |
| anti-Aβ-3C.35.23.4^{2xLALA} | SEQ ID NO: 417 | SEQ ID NO: 420 | SEQ ID NO:418 | SEQ ID NO: 420 |
| | (an anti-Aβ | (light chain | (an anti-Aβ | (light chain |
| | Fab region | of anti-Aβ | Fab region | of anti-Aβ |
| | fused to hinge | Fab region) | fused to hinge | Fab region) |
| | region and | | region and | |
| | 3C.35.23.4 with | | Fc with hole and | |
| | knob and LALA | | LALA mutations) | |
| | mutations) | | | |
| anti-Aβ-3C.35.23.4^{cisLALA} | SEQ ID NO: 417 | SEQ ID NO: 420 | SEQ ID NO: 419 | SEQ ID NO: 420 |
| | (an anti-Aβ | (light chain | (an anti-Aβ | (light chain |
| | Fab region | of anti-Aβ | Fab region | of anti-Aβ |
| | fused to hinge | Fab region) | fused to hinge | Fab region) |
| | region and | | region and | |
| | 3C.35.23.4 with | | Fc with hole | |
| | knob and LALA | | mutations) | |
| | mutations) | | | |

[0418] On Day 12, mice were perfused; brains were collected and sectioned sagittally at 40 μm for immunohistochemistry. Two brain sections (section 1: ˜3 mm lateral to the midline, section 2: at midline) per animal were selected for IHC analysis. Free-floating sections were incubated in blocking solution (5% donkey serum in PBS with 0.3% triton X-100) for two hours at room temperature, then with primary antibodies (anti-CD68, anti-human Abeta) overnight at 4° C. Sections were then washed 3× for 15 minutes, incubated with fluorescence-labelled secondary antibodies for 2 h at room temperature, DAPI solution for 20 minutes, and then washed 3× in PBS with 0.3% triton X-100. Sections were mounted onto slides and coverslipped using Prolong Glass Antifade mounting medium. Slides were imaged using a Zeiss Axioscan.Z1 slide scanner at 20× magnification and processed using custom macros in Zeiss ZEN software and image processing macros. Specifically, images were analyzed to determine the dilated plaque area (by size), area of plaque/CD68 microglia overlap, dilated CD68⁺ microglia area, count, and pixel intensity sum (by size: 9-14 μm², 14-33 μm², 33-75 μm², and 75-3,333 μm²), and plaque morphology, area, count, and pixel intensity sum (separating circular from irregular plaques using compactness <0.7 for irregular and >0.7 for circular; separating by size: 30-125 μm², 125-250 μm², 250-500 μm², and 500-3,300 μm²).

[0419] From these experiments, 5XFAD×TfR^{ms/hu} KI mice treated with anti-Aβ having a TfR-binding site with cis-LALA Fc polypeptide dimer elicited robust microglial recruitment towards Aβ plaques (as measured by colocalization of microglial marker CD68 and a Aβ marker) and reduced smaller plaques sized at 30-125 μm², in a manner similar to anti-Aβ (FIGS. 8A-8C). Importantly, these effects were not observed with anti-Aβ having a TfR-binding site with LALA mutations on both Fc polypeptides, which is consistent with the necessity of effector function in this disease paradigm. Overall, these data, along with other in vitro and in vivo data herein, provide compelling evidence that the platform backbone of TfR-binding Fc polypeptides with a cis-LALA configuration and relevant Fab binding site can mitigate reticulocyte safety, as well as elicit target-mediated effector function in a relevant disease model (i.e., microglial engagement in the brain).

[0420] It is understood that the examples and embodiments described herein are for illustrative purposes only and that various modifications or changes in light thereof will be suggested to persons skilled in the art and are to be included within the spirit and purview of this application and scope of the appended claims. The sequences of the sequence accession numbers cited herein are hereby incorporated by reference.

[0421] Unless otherwise defined, all technical and scientific terms used herein have the same meaning as commonly understood by one of ordinary skill in the art to which this invention belongs.

[0422] The inventions illustratively described herein may suitably be practiced in the absence of any element or elements, limitation or limitations, not specifically disclosed herein. Thus, for example, the terms “comprising,” “including,” “containing,” etc. shall be read expansively and without limitation. Additionally, the terms and expressions employed herein have been used as terms of description and not of limitation, and there is no intention in the use of such terms and expressions of excluding any equivalents of the features shown and described or portions thereof, but it is recognized that various modifications are possible within the scope of the invention claimed.

[0423] The amino acid substitutions for each clone described in the Tables (e.g., Tables 3 and 4) dictate the amino acid substitutions at the register positions of that clone over the amino acids found in the sequence set forth in the Sequence Listing, in case of discrepancy.

[0424] All publications, patent applications, patents, and other references mentioned herein are expressly incorporated by reference in their entirety, to the same extent as if each were incorporated by reference individually. In case of conflict, the present specification, including definitions, will control.

TABLE 3
CH3C Register Positions and Mutations

| Clone | | | | | | | | | | | | | | | | | | | |
|---|---|---|---|---|---|---|---|---|---|---|---|---|---|---|---|---|---|---|---|
| name | Group | 384 | 385 | 386 | 387 | 388 | 389 | 390 | 391 | ... | 413 | 414 | 415 | 416 | 417 | 418 | 419 | 420 | 421 |
| Wild- | n/a | N | G | Q | P | E | N | N | Y | ... | D | K | S | R | W | Q | Q | G | N |
| type | | | | | | | | | | | | | | | | | | | |
| 1 | | L | G | L | V | W | V | G | Y | ... | A | K | S | T | W | Q | Q | G | W |
| 2 | | Y | G | T | V | W | S | H | Y | ... | S | K | S | E | W | Q | Q | G | Y |
| 3 | | Y | G | T | E | W | S | Q | Y | ... | E | K | S | D | W | Q | Q | G | H |
| 4 | | V | G | T | P | W | A | L | Y | ... | L | K | S | E | W | Q | Q | G | W |
| 17 | 2 | Y | G | T | V | W | S | K | Y | ... | S | K | S | E | W | Q | Q | G | F |
| 18 | 1 | L | G | H | V | W | A | V | Y | ... | P | K | S | T | W | Q | Q | G | W |
| 21 | 1 | L | G | L | V | W | V | G | Y | ... | P | K | S | T | W | Q | Q | G | W |
| 25 | 1 | M | G | H | V | W | V | G | Y | ... | D | K | S | T | W | Q | Q | G | W |
| 34 | 1 | L | G | L | V | W | V | F | S | ... | P | K | S | T | W | Q | Q | G | W |
| 35 | 2 | Y | G | T | E | W | S | S | Y | ... | T | K | S | E | W | Q | Q | G | F |
| 44 | 2 | Y | G | T | E | W | S | N | Y | ... | S | K | S | E | W | Q | Q | G | F |
| 51 | 1/2 | L | G | H | V | W | V | G | Y | ... | S | K | S | E | W | Q | Q | G | W |
| 3.1-3 | 1 | L | G | H | V | W | V | A | T | ... | P | K | S | T | W | Q | Q | G | W |
| 3.1-9 | 1 | L | G | P | V | W | V | H | T | ... | P | K | S | T | W | Q | Q | G | W |
| 3.2-5 | 1 | L | G | H | V | W | V | D | Q | ... | P | K | S | T | W | Q | Q | G | W |
| 3.2-19 | 1 | L | G | H | V | W | V | N | Q | ... | P | K | S | T | W | Q | Q | G | W |
| 3.2-1 | 1 | L | G | H | V | W | V | N | F | ... | P | K | S | T | W | Q | Q | G | W |
| 3.4-1 | | W | G | F | V | W | S | T | Y | ... | P | K | S | N | W | Q | Q | G | F |
| 3.4-19 | | W | G | H | V | W | S | T | Y | ... | P | K | S | N | W | Q | Q | G | Y |
| 3.2-3 | | L | G | H | V | W | V | E | Q | ... | P | K | S | T | W | Q | Q | G | W |
| 3.2-14 | | L | G | H | V | W | V | G | V | ... | P | K | S | T | W | Q | Q | G | W |
| 3.2-24 | | L | G | H | V | W | V | H | T | ... | P | K | S | T | W | Q | Q | G | W |
| 3.4-26 | | W | G | T | V | W | G | T | Y | ... | P | K | S | N | W | Q | Q | G | Y |
| 3.2-17 | | L | G | H | V | W | V | G | T | ... | P | K | S | T | W | Q | Q | G | W |

TABLE 4
Additional CH3C Register Positions and Mutations

| Clone name | 378 | 379 | 380 | 381 | 382 | 383 | 384 | 385 | 386 | 387 | 388 | 389 | 390 | 391 | 392 | 411 | 412 | 413 | 414 | 415 | 416 | 417 | 418 | 419 | 420 | 421 | 422 | 423 |
|---|---|---|---|---|---|---|---|---|---|---|---|---|---|---|---|---|---|---|---|---|---|---|---|---|---|---|---|---|
| Wild-type | A | V | E | W | E | S | N | G | Q | P | E | N | N | Y | K | T | V | D | K | S | R | W | Q | Q | G | N | V | F |
| 35.20.1 | . | . | . | . | . | . | F | . | T | E | W | S | S | . | . | . | . | T | . | E | E | . | . | . | . | F | . | . |
| 35.20.2 | . | . | . | . | . | . | Y | . | T | E | W | A | S | . | . | . | . | T | . | E | E | . | . | . | . | F | . | . |
| 35.20.3 | . | . | . | . | . | . | Y | . | T | E | W | V | S | . | . | . | . | T | . | E | E | . | . | . | . | F | . | . |
| 35.20.4 | . | . | . | . | . | . | Y | . | T | E | W | S | S | . | . | . | . | S | . | E | E | . | . | . | . | F | . | . |
| 35.20.5 | . | . | . | . | . | . | F | . | T | E | W | A | S | . | . | . | . | T | . | E | E | . | . | . | . | F | . | . |
| 35.20.6 | . | . | . | . | . | . | F | . | T | E | W | V | S | . | . | . | . | T | . | E | E | . | . | . | . | F | . | . |
| 35.21.a.1 | . | . | W | . | . | . | F | . | T | E | W | S | S | . | . | . | . | T | . | E | E | . | . | . | . | F | . | . |
| 35.21.a.2 | . | . | W | . | . | . | Y | . | T | E | W | A | S | . | . | . | . | T | . | E | E | . | . | . | . | F | . | . |
| 35.21.a.3 | . | . | W | . | . | . | Y | . | T | E | W | V | S | . | . | . | . | T | . | E | E | . | . | . | . | F | . | . |
| 35.21.a.4 | . | . | W | . | . | . | Y | . | T | E | W | S | S | . | . | . | . | S | . | E | E | . | . | . | . | F | . | . |
| 35.21.a.5 | . | . | W | . | . | . | F | . | T | E | W | A | S | . | . | . | . | T | . | E | E | . | . | . | . | F | . | . |
| 35.21.a.6 | . | . | W | . | . | . | F | . | T | E | W | V | S | . | . | . | . | T | . | E | E | . | . | . | . | F | . | . |
| 35.23.1 | . | . | . | . | . | . | F | . | T | E | W | S | . | . | . | . | . | T | . | E | E | . | . | . | . | F | . | . |
| 35.23.2 | . | . | . | . | . | . | Y | . | T | E | W | A | . | . | . | . | . | T | . | E | E | . | . | . | . | F | . | . |
| 35.23.3 | . | . | . | . | . | . | Y | . | T | E | W | V | . | . | . | . | . | T | . | E | E | . | . | . | . | F | . | . |
| 35.23.4 | . | . | . | . | . | . | Y | . | T | E | W | S | . | . | . | . | . | S | . | E | E | . | . | . | . | F | . | . |
| 35.23.5 | . | . | . | . | . | . | F | . | T | E | W | A | . | . | . | . | . | T | . | E | E | . | . | . | . | F | . | . |
| 35.23.6 | . | . | . | . | . | . | F | . | T | E | W | V | . | . | . | . | . | T | . | E | E | . | . | . | . | F | . | . |
| 35.24.1 | . | . | W | . | . | . | F | . | T | E | W | S | . | . | . | . | . | T | . | E | E | . | . | . | . | F | . | . |
| 35.24.2 | . | . | W | . | . | . | Y | . | T | E | W | A | . | . | . | . | . | T | . | E | E | . | . | . | . | F | . | . |
| 35.24.3 | . | . | W | . | . | . | Y | . | T | E | W | V | . | . | . | . | . | T | . | E | E | . | . | . | . | F | . | . |
| 35.24.4 | . | . | W | . | . | . | Y | . | T | E | W | S | . | . | . | . | . | S | . | E | E | . | . | . | . | F | . | . |
| 35.24.5 | . | . | W | . | . | . | F | . | T | E | W | A | . | . | . | . | . | T | . | E | E | . | . | . | . | F | . | . |
| 35.24.6 | . | . | W | . | . | . | F | . | T | E | W | V | . | . | . | . | . | T | . | E | E | . | . | . | . | F | . | . |
| 35.21.17.1 | . | . | L | . | . | . | F | . | T | E | W | S | S | . | . | . | . | T | . | E | E | . | . | . | . | F | . | . |
| 35.21.17.2 | . | . | L | . | . | . | Y | . | T | E | W | A | S | . | . | . | . | T | . | E | E | . | . | . | . | F | . | . |
| 35.21.17.3 | . | . | L | . | . | . | Y | . | T | E | W | V | S | . | . | . | . | T | . | E | E | . | . | . | . | F | . | . |
| 35.21.17.4 | . | . | L | . | . | . | Y | . | T | E | W | S | S | . | . | . | . | S | . | E | E | . | . | . | . | F | . | . |
| 35.21.17.5 | . | . | L | . | . | . | F | . | T | E | W | A | S | . | . | . | . | T | . | E | E | . | . | . | . | F | . | . |
| 35.21.17.6 | . | . | L | . | . | . | F | . | T | E | W | V | S | . | . | . | . | T | . | E | E | . | . | . | . | F | . | . |
| 35.20 | . | . | . | . | . | . | Y | . | T | E | W | S | S | . | . | . | . | T | . | E | E | . | . | . | . | F | . | . |
| 35.21 | . | . | W | . | . | . | Y | . | T | E | W | S | S | . | . | . | . | T | . | E | E | . | . | . | . | F | . | . |
| 35.22 | . | . | W | . | . | . | Y | . | T | E | W | S | . | . | . | . | . | T | . | . | E | . | . | . | . | F | . | . |
| 35.23 | . | . | . | . | . | . | Y | . | T | E | W | S | . | . | . | . | . | T | . | E | E | . | . | . | . | F | . | . |
| 35.24 | . | . | W | . | . | . | Y | . | T | E | W | S | . | . | . | . | . | T | . | E | E | . | . | . | . | F | . | . |
| 35.21.17 | . | . | L | . | . | . | Y | . | T | E | W | S | S | . | . | . | . | T | . | E | E | . | . | . | . | F | . | . |
| 35.N390 | . | . | . | . | . | . | Y | . | T | E | W | S | . | . | . | . | . | T | . | . | E | . | . | . | . | F | . | . |
| 35.20.1.1 | | | | | | | F | | T | E | W | S | S | | | | | S | | E | E | | | | | F | | |
| 35.23.2.1 | | | | | | | Y | | T | E | W | A | | | | | | S | | | E | | | | | F | | |
| 35.23.1.1 | | | | | | | F | | T | E | W | S | | | | | | S | | E | E | | | | | F | | |
| 35.S413 | | | | | | | Y | | T | E | W | S | S | | | | | S | | | E | | | | | F | | |
| 35.23.3.1 | | | | | | | Y | | T | E | W | V | | | | | | S | | E | E | | | | | F | | |
| 35.N390.1 | | | | | | | Y | | T | E | W | S | | | | | | S | | | E | | | | | F | | |
| 35.23.6.1 | | | | | | | F | | T | E | W | V | | | | | | S | | E | E | | | | | F | | |

### INFORMAL SEQUENCE LISTING

| SEQ ID | | |
|---|---|---|
| NO: | Sequence | Description |
| 1 | APELLGGPSVFLFPPKPKDTLMISRTPEVTCVVVDVSHEDPEVKFNW | Wild-type human Fc |
| | YVDGVEVHNAKTKPREEQYNSTYRVVSVLTVLHQDWLNGKEYKCK | sequence |
| | VSNKALPAPIEKTISKAKGQPREPQVYTLPPSRDELTKNQVSLTCLVK | |
| | GFYPSDIAVEWESNGQPENNYKTTPPVLDSDGSFFLYSKLTVDKSRW | |
| | QQGNVFSCSVMHEALHNHYTQKSLSLSPGK | |
| 2 | APELLGGPSVFLFPPKPKDTLMISRTPEVTCVVVDVSHEDPEVKFNW | CH2 domain sequence |
| | YVDGVEVHNAKTKPREEQYNSTYRVVSVLTVLHQDWLNGKEYKCK | |
| | VSNKALPAPIEKTISKAK | |
| 3 | GQPREPQVYTLPPSRDELTKNQVSLTCLVKGFYPSDIAVEWESNGQP | CH3 domain sequence |
| | ENNYKTTPPVLDSDGSFFLYSKLTVDKSRWQQGNVFSCSVMHEALH | |
| | NHYTQKSLSLSPGK | |
| 4 | APELLGGPSVFLFPPKPKDTLMISRTPEVTCVVVDVSHEDPEVKFNW | Clone CH3C.1 |
| | YVDGVEVHNAKTKPREEQYNSTYRVVSVLTVLHQDWLNGKEYKCK | |
| | VSNKALPAPIEKTISKAKGQPREPQVYTLPPSRDELTKNQVSLTCLVK | |
| | GFYPSDIAVEWESLGLVWVGYKTTPPVLDSDGSFFLYSKLTVAKSTW | |
| | QQGWVFSCSVMHEALHNHYTQKSLSLSPGK | |
| 5 | APELLGGPSVFLFPPKPKDTLMISRTPEVTCVVVDVSHEDPEVKFNW | Clone CH3C.2 |
| | YVDGVEVHNAKTKPREEQYNSTYRVVSVLTVLHQDWLNGKEYKCK | |
| | VSNKALPAPIEKTISKAKGQPREPQVYTLPPSRDELTKNQVSLTCLVK | |
| | GFYPSDIAVEWESYGTVWSHYKTTPPVLDSDGSFFLYSKLTVSKSEW | |
| | QQGYVFSCSVMHEALHNHYTQKSLSLSPGK | |
| 6 | APELLGGPSVFLFPPKPKDTLMISRTPEVTCVVVDVSHEDPEVKFNW | Clone CH3C.3 |
| | YVDGVEVHNAKTKPREEQYNSTYRVVSVLTVLHQDWLNGKEYKCK | |
| | VSNKALPAPIEKTISKAKGQPREPQVYTLPPSRDELTKNQVSLTCLVK | |
| | GFYPSDIAVEWESYGTEWSQYKTTPPVLDSDGSFFLYSKLTVEKSDW | |
| | QQGHVFSCSVMHEALHNHYTQKSLSLSPGK | |
| 7 | APELLGGPSVFLFPPKPKDTLMISRTPEVTCVVVDVSHEDPEVKFNW | Clone CH3C.4 |
| | YVDGVEVHNAKTKPREEQYNSTYRVVSVLTVLHQDWLNGKEYKCK | |
| | VSNKALPAPIEKTISKAKGQPREPQVYTLPPSRDELTKNQVSLTCLVK | |
| | GFYPSDIAVEWESVGTPWALYKTTPPVLDSDGSFFLYSKLTVLKSEW | |
| | QQGWVFSCSVMHEALHNHYTQKSLSLSPGK | |
| 8 | APELLGGPSVFLFPPKPKDTLMISRTPEVTCVVVDVSHEDPEVKFNW | Clone CH3C.17 |
| | YVDGVEVHNAKTKPREEQYNSTYRVVSVLTVLHQDWLNGKEYKCK | |
| | VSNKALPAPIEKTISKAKGQPREPQVYTLPPSRDELTKNQVSLTCLVK | |
| | GFYPSDIAVEWESYGTVWSKYKTTPPVLDSDGSFFLYSKLTVSKSEW | |
| | QQGFVFSCSVMHEALHNHYTQKSLSLSPGK | |
| 9 | APELLGGPSVFLFPPKPKDTLMISRTPEVTCVVVDVSHEDPEVKFNW | Clone CH3C.18 |
| | YVDGVEVHNAKTKPREEQYNSTYRVVSVLTVLHQDWLNGKEYKCK | |
| | VSNKALPAPIEKTISKAKGQPREPQVYTLPPSRDELTKNQVSLTCLVK | |
| | GFYPSDIAVEWESLGHVWAVYKTTPPVLDSDGSFFLYSKLTVPKSTW | |
| | QQGWVFSCSVMHEALHNHYTQKSLSLSPGK | |
| 10 | APELLGGPSVFLFPPKPKDTLMISRTPEVTCVVVDVSHEDPEVKFNW | Clone CH3C.21 |
| | YVDGVEVHNAKTKPREEQYNSTYRVVSVLTVLHQDWLNGKEYKCK | |
| | VSNKALPAPIEKTISKAKGQPREPQVYTLPPSRDELTKNQVSLTCLVK | |
| | GFYPSDIAVEWESLGLVWVGYKTTPPVLDSDGSFFLYSKLTVPKSTW | |
| | QQGWVFSCSVMHEALHNHYTQKSLSLSPGK | |
| 11 | APELLGGPSVFLFPPKPKDTLMISRTPEVTCVVVDVSHEDPEVKFNW | Clone CH3C.25 |
| | YVDGVEVHNAKTKPREEQYNSTYRVVSVLTVLHQDWLNGKEYKCK | |
| | VSNKALPAPIEKTISKAKGQPREPQVYTLPPSRDELTKNQVSLTCLVK | |
| | GFYPSDIAVEWESMGHVWVGYKTTPPVLDSDGSFFLYSKLTVDKST | |
| | WQQGWVFSCSVMHEALHNHYTQKSLSLSPGK | |
| 12 | APELLGGPSVFLFPPKPKDTLMISRTPEVTCVVVDVSHEDPEVKFNW | Clone CH3C.34 |
| | YVDGVEVHNAKTKPREEQYNSTYRVVSVLTVLHQDWLNGKEYKCK | |
| | VSNKALPAPIEKTISKAKGQPREPQVYTLPPSRDELTKNQVSLTCLVK | |
| | GFYPSDIAVEWESLGLVWVFSKTTPPVLDSDGSFFLYSKLTVPKSTW | |
| | QQGWVFSCSVMHEALHNHYTQKSLSLSPGK | |
| 13 | APELLGGPSVFLFPPKPKDTLMISRTPEVTCVVVDVSHEDPEVKFNW | Clone CH3C.35 |
| | YVDGVEVHNAKTKPREEQYNSTYRVVSVLTVLHQDWLNGKEYKCK | |
| | VSNKALPAPIEKTISKAKGQPREPQVYTLPPSRDELTKNQVSLTCLVK | |
| | GFYPSDIAVEWESYGTEWSSYKTTPPVLDSDGSFFLYSKLTVTKSEW | |
| | QQGFVFSCSVMHEALHNHYTQKSLSLSPGK | |
| 14 | APELLGGPSVFLFPPKPKDTLMISRTPEVTCVVVDVSHEDPEVKFNW | Clone CH3C.44 |
| | YVDGVEVHNAKTKPREEQYNSTYRVVSVLTVLHQDWLNGKEYKCK | |
| | VSNKALPAPIEKTISKAKGQPREPQVYTLPPSRDELTKNQVSLTCLVK | |
| | GFYPSDIAVEWESYGTEWSNYKTTPPVLDSDGSFFLYSKLTVSKSEW | |
| | QQGFVFSCSVMHEALHNHYTQKSLSLSPGK | |
| 15 | APELLGGPSVFLFPPKPKDTLMISRTPEVTCVVVDVSHEDPEVKFNW | Clone CH3C.51 |
| | YVDGVEVHNAKTKPREEQYNSTYRVVSVLTVLHQDWLNGKEYKCK | |
| | VSNKALPAPIEKTISKAKGQPREPQVYTLPPSRDELTKNQVSLTCLVK | |
| | GFYPSDIAVEWESLGHVWVGYKTTPPVLDSDGSFFLYSKLTVSKSEW | |
| | QQGWVFSCSVMHEALHNHYTQKSLSLSPGK | |
| 16 | APELLGGPSVFLFPPKPKDTLMISRTPEVTCVVVDVSHEDPEVKFNW | Clone CH3C.3.1-3 |
| | YVDGVEVHNAKTKPREEQYNSTYRVVSVLTVLHQDWLNGKEYKCK | |
| | VSNKALPAPIEKTISKAKGQPREPQVYTLPPSRDELTKNQVSLTCLVK | |
| | GFYPSDIAVEWESLGHVWVATKTTPPVLDSDGSFFLYSKLTVPKSTW | |
| | QQGWVFSCSVMHEALHNHYTQKSLSLSPGK | |
| 17 | APELLGGPSVFLFPPKPKDTLMISRTPEVTCVVVDVSHEDPEVKFNW | Clone CH3C.3.1-9 |
| | YVDGVEVHNAKTKPREEQYNSTYRVVSVLTVLHQDWLNGKEYKCK | |
| | VSNKALPAPIEKTISKAKGQPREPQVYTLPPSRDELTKNQVSLTCLVK | |
| | GFYPSDIAVEWESLGPVWVHTKTTPPVLDSDGSFFLYSKLTVPKSTW | |
| | QQGWVFSCSVMHEALHNHYTQKSLSLSPGK | |
| 18 | APELLGGPSVFLFPPKPKDTLMISRTPEVTCVVVDVSHEDPEVKFNW | Clone CH3C.3.2-5 |
| | YVDGVEVHNAKTKPREEQYNSTYRVVSVLTVLHQDWLNGKEYKCK | |
| | VSNKALPAPIEKTISKAKGQPREPQVYTLPPSRDELTKNQVSLTCLVK | |
| | GFYPSDIAVEWESLGHVWVDQKTTPPVLDSDGSFFLYSKLTVPKSTW | |
| | QQGWVFSCSVMHEALHNHYTQKSLSLSPGK | |
| 19 | APELLGGPSVFLFPPKPKDTLMISRTPEVTCVVVDVSHEDPEVKFNW | Clone CH3C.3.2-19 |
| | YVDGVEVHNAKTKPREEQYNSTYRVVSVLTVLHQDWLNGKEYKCK | |
| | VSNKALPAPIEKTISKAKGQPREPQVYTLPPSRDELTKNQVSLTCLVK | |
| | GFYPSDIAVEWESLGHVWVNQKTTPPVLDSDGSFFLYSKLTVPKSTW | |
| | QQGWVFSCSVMHEALHNHYTQKSLSLSPGK | |
| 20 | APELLGGPSVFLFPPKPKDTLMISRTPEVTCVVVDVSHEDPEVKFNW | Clone CH3C.3.2-1 |
| | YVDGVEVHNAKTKPREEQYNSTYRVVSVLTVLHQDWLNGKEYKCK | |
| | VSNKALPAPIEKTISKAKGQPREPQVYTLPPSRDELTKNQVSLTCLVK | |
| | GFYPSDIAVEWESLGHVWVNFKTTPPVLDSDGSFFLYSKLTVPKSTW | |
| | QQGWVFSCSVMHEALHNHYTQKSLSLSPGK | |
| 21 | APELLGGPSVFLFPPKPKDTLMISRTPEVTCVVVDVSHEDPEVKFNW | Clone CH3C.18.E153W |
| | YVDGVEVHNAKTKPREEQYNSTYRVVSVLTVLHQDWLNGKEYKCK | |
| | VSNKALPAPIEKTISKAKGQPREPQVYTLPPSRDELTKNQVSLTCLVK | |
| | GFYPSDIAVWWESLGHVWAVYKTTPPVLDSDGSFFLYSKLTVPKST | |
| | WQQGWVFSCSVMHEALHNHYTQKSLSLSPGK | |
| 22 | APELLGGPSVFLFPPKPKDTLMISRTPEVTCVVVDVSHEDPEVKFNW | Clone CH3C.18.K165Q |
| | YVDGVEVHNAKTKPREEQYNSTYRVVSVLTVLHQDWLNGKEYKCK | (CH3C.35.14) |
| | VSNKALPAPIEKTISKAKGQPREPQVYTLPPSRDELTKNQVSLTCLVK | |
| | GFYPSDIAVEWESLGHVWAVYQTTPPVLDSDGSFFLYSKLTVPKSTW | |
| | QQGWVFSCSVMHEALHNHYTQKSLSLSPGK | |
| 23 | APELLGGPSVFLFPPKPKDTLMISRTPEVTCVVVDVSHEDPEVKFNW | Clone CH3C.18.E153W. |
| | YVDGVEVHNAKTKPREEQYNSTYRVVSVLTVLHQDWLNGKEYKCK | K165Q (CH3C.35.15) |
| | VSNKALPAPIEKTISKAKGQPREPQVYTLPPSRDELTKNQVSLTCLVK | |
| | GFYPSDIAVWWESLGHVWAVYQTTPPVLDSDGSFFLYSKLTVPKST | |
| | WQQGWVFSCSVMHEALHNHYTQKSLSLSPGK | |
| 24 | APELLGGPSVFLFPPKPKDTLMISRTPEVTCVVVDVSHEDPEVKFNW | Clone CH3C.35.E153W |
| | YVDGVEVHNAKTKPREEQYNSTYRVVSVLTVLHQDWLNGKEYKCK | (CH3C.35.19) |
| | VSNKALPAPIEKTISKAKGQPREPQVYTLPPSRDELTKNQVSLTCLVK | |
| | GFYPSDIAVWWESYGTEWSSYKTTPPVLDSDGSFFLYSKLTVTKSEW | |
| | QQGFVFSCSVMHEALHNHYTQKSLSLSPGK | |
| 25 | APELLGGPSVFLFPPKPKDTLMISRTPEVTCVVVDVSHEDPEVKFNW | Clone CH3C.35.S188E |
| | YVDGVEVHNAKTKPREEQYNSTYRVVSVLTVLHQDWLNGKEYKCK | (CH3C.35.20) |
| | VSNKALPAPIEKTISKAKGQPREPQVYTLPPSRDELTKNQVSLTCLVK | |
| | GFYPSDIAVEWESYGTEWSSYKTTPPVLDSDGSFFLYSKLTVTKEEW | |
| | QQGFVFSCSVMHEALHNHYTQKSLSLSPGK | |
| 26 | APELLGGPSVFLFPPKPKDTLMISRTPEVTCVVVDVSHEDPEVKFNW | Clone CH3C.35.E153W. |
| | YVDGVEVHNAKTKPREEQYNSTYRVVSVLTVLHQDWLNGKEYKCK | S188E (CH3C.35.21) |
| | VSNKALPAPIEKTISKAKGQPREPQVYTLPPSRDELTKNQVSLTCLVK | |
| | GFYPSDIAVWWESYGTEWSSYKTTPPVLDSDGSFFLYSKLTVTKEEW | |
| | QQGFVFSCSVMHEALHNHYTQKSLSLSPGK | |
| 27 | APELLGGPSVFLFPPKPKDTLMISRTPEVTCVVVDVSHEDPEVKFNW | Clone CH3C.35.N163 |
| | YVDGVEVHNAKTKPREEQYNSTYRVVSVLTVLHQDWLNGKEYKCK | |
| | VSNKALPAPIEKTISKAKGQPREPQVYTLPPSRDELTKNQVSLTCLVK | |
| | GFYPSDIAVEWESYGTEWSNYKTTPPVLDSDGSFFLYSKLTVTKSEW | |
| | QQGFVFSCSVMHEALHNHYTQKSLSLSPGK | |
| 28 | APELLGGPSVFLFPPKPKDTLMISRTPEVTCVVVDVSHEDPEVKFNW | Clone CH3C.35.K165Q |
| | YVDGVEVHNAKTKPREEQYNSTYRVVSVLTVLHQDWLNGKEYKCK | |
| | VSNKALPAPIEKTISKAKGQPREPQVYTLPPSRDELTKNQVSLTCLVK | |
| | GFYPSDIAVEWESYGTEWSSYQTTPPVLDSDGSFFLYSKLTVTKSEW | |
| | QQGFVFSCSVMHEALHNHYTQKSLSLSPGK | |
| 29 | APELLGGPSVFLFPPKPKDTLMISRTPEVTCVVVDVSHEDPEVKFNW | Clone CH3C.35.N163. |
| | YVDGVEVHNAKTKPREEQYNSTYRVVSVLTVLHQDWLNGKEYKCK | K165Q |
| | VSNKALPAPIEKTISKAKGQPREPQVYTLPPSRDELTKNQVSLTCLVK | |
| | GFYPSDIAVEWESYGTEWSNYQTTPPVLDSDGSFFLYSKLTVTKSEW | |
| | QQGFVFSCSVMHEALHNHYTQKSLSLSPGK | |
| 30 | APELLGGPSVFLFPPKPKDTLMISRTPEVTCVVVDVSHEDPEVKFNW | CH3C library (X denotes |
| | YVDGVEVHNAKTKPREEQYNSTYRVVSVLTVLHQDWLNGKEYKCK | randomized amino acid |
| | VSNKALPAPIEKTISKAKGQPREPQVYTLPPSRDELTKNQVSLTCLVK | position) |
| | GFYPSDIAVEWESXGXXXXXYKTTPPVLDSDGSFFLYSKLTVXKXX | |
| | WQQGXVFSCSVMHEALHNHYTQKSLSLSPGK | |
| 31 | NSVIIVDKNGRLVYLVENPGGYVAYSKAATVTGKLVHANFGTKKDF | Human TfR apical domain |
| | EDLYTPVNGSIVIVRAGKITFAEKVANAESLNAIGVLIYMDQTKFPIV | |
| | NAELSFFGHAHLGTGDPYTPGFPSFNHTQFPPSRSSGLPNIPVQTISRA | |
| | AAEKLFGNMEGDCPSDWKTDSTCRMVTSESKNVKLTVS | |
| 32 | NSVIIVDKNGGLVYLVENPGGYVAYSKAATVTGKLVHANFGTKKDF | Cynomolgus TfR apical |
| | EDLDSPVNGSIVIVRAGKITFAEKVANAESLNAIGVLIYMDQTKFPIV | domain |
| | KADLSFFGHAHLGTGDPYTPGFPSFNHTQFPPSQSSGLPNIPVQTISRA | |
| | AAEKLFGNMEGDCPSDWKTDSTCKMVTSENKSVKLTVS | |
| 33 | SSGLPNIPVQTISRAAAEKLFGNMEGDCPSDWKTDSTCRMVTSESKN | Loop-truncated human |
| | VKLTVSNDSAQNSVIIVDKNGRLVYLVENPGGYVAYSKAATVTGKL | TfR apical domain |
| | VHANFGTKKDFEDLYTPVNGSIVIVRAGKITFAEKVANAESLNAIGVL | displayed on phage |
| | IYMDQTKFPIVNAELSGP | |
| 34 | SSGLPNIPVQTISRAAAEKLFGNMEGDCPSDWKTDSTCKMVTSENKS | Loop-truncated |
| | VKLTVSNDSAQNSVIIVDKNGGLVYLVENPGGYVAYSKAATVTGKL | cynomolgus TfR apical |
| | VHANFGTKKDFEDLDSPVNGSIVIVRAGKITFAEKVANAESLNAIGVL | domain displayed on |
| | IYMDQTKFPIVKADLSGP | phage |
| 35 | WESXGXXXXXYK | First portion CH3C |
| | | register |
| 36 | TVMOOCWQQGXV | Second portion CH3C |
| | | register |
| 37 | YGTEW | CH3C conserved sequence |
| 38 | LGLVWVG | CH3C modified binding |
| | | sequence |
| 39 | YGTVWSH | CH3C modified binding |
| | | sequence |
| 40 | YGTEWSQ | CH3C modified binding |
| | | sequence |
| 41 | VGTPWAL | CH3C modified binding |
| | | sequence |
| 42 | YGTVWSK | CH3C modified binding |
| | | sequence |
| 43 | LGHVWAV | CH3C modified binding |
| | | sequence |
| 44 | MGHVWVG | CH3C modified binding |
| | | sequence |
| 45 | LGLVGVF | CH3C modified binding |
| | | sequence |
| 46 | YGTEWSS | CH3C modified binding |
| | | sequence |
| 47 | YGTEWSN | CH3C modified binding |
| | | sequence |
| 48 | LGHVWVG | CH3C modified binding |
| | | sequence |
| 49 | LGHVWVA | CH3C modified binding |
| | | sequence |
| 50 | LGPVWVH | CH3C modified binding |
| | | sequence |
| 51 | LGHVWVD | CH3C modified binding |
| | | sequence |
| 52 | LGHVWVN | CH3C modified binding |
| | | sequence |
| 53 | AKSTWQQGW | CH3C modified binding |
| | | sequence |
| 54 | SKSEWQQGY | CH3C modified binding |
| | | sequence |
| 55 | EKSDWQQGH | CH3C modified binding |
| | | sequence |
| 56 | LKSEWQQGW | CH3C modified binding |
| | | sequence |
| 57 | SKSEWQQGF | CH3C modified binding |
| | | sequence |
| 58 | PKSTWQQGW | CH3C modified binding |
| | | sequence |
| 59 | DKSTWQQGW | CH3C modified binding |
| | | sequence |
| 60 | TKSEWQQGF | CH3C modified binding |
| | | sequence |
| 61 | SKSEWQQGW | CH3C modified binding |
| | | sequence |
| 62 | EPKSCDKTHTCPPCP | Human IgG1 hinge amino |
| | | acid sequence |
| 63 | MMDQARSAFSNLFGGEPLSYTRFSLARQVDGDNSHVEMKLAVDEEE | Human transferrin receptor |
| | NADNNTKANVTKPKRCSGSICYGTIAVIVFFLIGFMIGYLGYCKGVEP | protein 1 (TFR1) |
| | KTECERLAGTESPVREEPGEDFPAARRLYWDDLKRKLSEKLDSTDFT | |
| | GTIKLLNENSYVPREAGSQKDENLALYVENQFREFKLSKVWRDQHF | |
| | VKIQVKDSAQNSVIIVDKNGRLVYLVENPGGYVAYSKAATVTGKLV | |
| | HANFGTKKDFEDLYTPVNGSIVIVRAGKITFAEKVANAESLNAIGVLI | |
| | YMDQTKFPIVNAELSFFGHAHLGTGDPYTPGFPSFNHTQFPPSRSSGL | |
| | PNIPVQTISRAAAEKLFGNMEGDCPSDWKTDSTCRMVTSESKNVKLT | |
| | VSNVLKEIKILNIFGVIKGFVEPDHYVVVGAQRDAWGPGAAKSGVGT | |
| | ALLLKLAQMFSDMVLKDGFQPSRSIIFASWSAGDFGSVGAIEWLEGY | |
| | LSSLHLKAFTYINLDKAVLGTSNFKVSASPLLYTLIEKTMQNVKHPVT | |
| | GQFLYQDSNWASKVEKLTLDNAAFPFLAYSGIPAVSFCFCEDTDYPY | |
| | LGTTMDTYKELIERIPELNKVARAAAEVAGQFVIKLTHDVELNLDYE | |
| | RYNSQLLSFVRDLNQYRADIKEMGLSLQWLYSARGDFFRATSRLTTD | |
| | FGNAEKTDRFVMKKLNDRVMRVEYHFLSPYVSPKESPFRHVFWGSG | |
| | SHTLPALLENLKLRKQNNGAFNETLFRNQLALATWTIQGAANALSG | |
| | DVWDIDNEF | |
| 64 | APELLGGPSVFLFPPKPKDTLMISRTPEVTCVVVDVSHEDPEVKFNW | Clone CH3C.35.19 |
| | YVDGVEVHNAKTKPREEQYNSTYRVVSVLTVLHQDWLNGKEYKCK | |
| | VSNKALPAPIEKTISKAKGQPREPQVYTLPPSRDELTKNQVSLTCLVK | |
| | GFYPSDIAVWWESYGTEWSSYKTTPPVLDSDGSFFLYSKLTVTKSEW | |
| | QQGFVFSCSVMHEALHNHYTQKSLSLSPGK | |
| 65 | APELLGGPSVFLFPPKPKDTLMISRTPEVTCVVVDVSHEDPEVKFNW | Clone CH3C.35.20 |
| | YVDGVEVHNAKTKPREEQYNSTYRVVSVLTVLHQDWLNGKEYKCK | |
| | VSNKALPAPIEKTISKAKGQPREPQVYTLPPSRDELTKNQVSLTCLVK | |
| | GFYPSDIAVEWESYGTEWSSYKTTPPVLDSDGSFFLYSKLTVTKEEW | |
| | QQGFVFSCSVMHEALHNHYTQKSLSLSPGK | |
| 66 | APELLGGPSVFLFPPKPKDTLMISRTPEVTCVVVDVSHEDPEVKFNW | Clone CH3C.35.21 |
| | YVDGVEVHNAKTKPREEQYNSTYRVVSVLTVLHQDWLNGKEYKCK | |
| | VSNKALPAPIEKTISKAKGQPREPQVYTLPPSRDELTKNQVSLTCLVK | |
| | GFYPSDIAVWWESYGTEWSSYKTTPPVLDSDGSFFLYSKLTVTKEEW | |
| | QQGFVFSCSVMHEALHNHYTQKSLSLSPGK | |
| 67 | APELLGGPSVFLFPPKPKDTLMISRTPEVTCVVVDVSHEDPEVKFNW | Clone CH3C.35.22 |
| | YVDGVEVHNAKTKPREEQYNSTYRVVSVLTVLHQDWLNGKEYKCK | |
| | VSNKALPAPIEKTISKAKGQPREPQVYTLPPSRDELTKNQVSLTCLVK | |
| | GFYPSDIAVWWESYGTEWSNYKTTPPVLDSDGSFFLYSKLTVTKSEW | |
| | QQGFVFSCSVMHEALHNHYTQKSLSLSPGK | |
| 68 | APELLGGPSVFLFPPKPKDTLMISRTPEVTCVVVDVSHEDPEVKFNW | Clone CH3C.35.23 |
| | YVDGVEVHNAKTKPREEQYNSTYRVVSVLTVLHQDWLNGKEYKCK | |
| | VSNKALPAPIEKTISKAKGQPREPQVYTLPPSRDELTKNQVSLTCLVK | |
| | GFYPSDIAVEWESYGTEWSNYKTTPPVLDSDGSFFLYSKLTVTKEEW | |
| | QQGFVFSCSVMHEALHNHYTQKSLSLSPGK | |
| 69 | APELLGGPSVFLFPPKPKDTLMISRTPEVTCVVVDVSHEDPEVKFNW | Clone CH3C.35.24 |
| | YVDGVEVHNAKTKPREEQYNSTYRVVSVLTVLHQDWLNGKEYKCK | |
| | VSNKALPAPIEKTISKAKGQPREPQVYTLPPSRDELTKNQVSLTCLVK | |
| | GFYPSDIAVWWESYGTEWSNYKTTPPVLDSDGSFFLYSKLTVTKEE | |
| | WQQGFVFSCSVMHEALHNHYTQKSLSLSPGK | |
| 70 | APELLGGPSVFLFPPKPKDTLMISRTPEVTCVVVDVSHEDPEVKFNW | CH3C.18 variant |
| | YVDGVEVHNAKTKPREEQYNSTYRVVSVLTVLHQDWLNGKEYKCK | |
| | VSNKALPAPIEKTISKAKGQPREPQVYTLPPSRDELTKNQVSLTCLVK | |
| | GFYPSDIAVWWESLGHVWAVYKTTPPVLDSDGSFFLYSKLTVPKST | |
| | WQQGWVFSCSVMHEALHNHYTQKSLSLSPGK | |
| 71 | APELLGGPSVFLFPPKPKDTLMISRTPEVTCVVVDVSHEDPEVKFNW | CH3C.18 variant |
| | YVDGVEVHNAKTKPREEQYNSTYRVVSVLTVLHQDWLNGKEYKCK | |
| | VSNKALPAPIEKTISKAKGQPREPQVYTLPPSRDELTKNQVSLTCLVK | |
| | GFYPSDIAVLWESLGHVWAVYKTTPPVLDSDGSFFLYSKLTVPKSTW | |
| | QQGWVFSCSVMHEALHNHYTQKSLSLSPGK | |
| 72 | APELLGGPSVFLFPPKPKDTLMISRTPEVTCVVVDVSHEDPEVKFNW | CH3C.18 variant |
| | YVDGVEVHNAKTKPREEQYNSTYRVVSVLTVLHQDWLNGKEYKCK | |
| | VSNKALPAPIEKTISKAKGQPREPQVYTLPPSRDELTKNQVSLTCLVK | |
| | GFYPSDIAVYWESLGHVWAVYKTTPPVLDSDGSFFLYSKLTVPKSTW | |
| | QQGWVFSCSVMHEALHNHYTQKSLSLSPGK | |
| 73 | APELLGGPSVFLFPPKPKDTLMISRTPEVTCVVVDVSHEDPEVKFNW | CH3C.18 variant |
| | YVDGVEVHNAKTKPREEQYNSTYRVVSVLTVLHQDWLNGKEYKCK | |
| | VSNKALPAPIEKTISKAKGQPREPQVYTLPPSRDELTKNQVSLTCLVK | |
| | GFYPSDIAVEWESLGHVWAVYQTTPPVLDSDGSFFLYSKLTVPKSTW | |
| | QQGWVFSCSVMHEALHNHYTQKSLSLSPGK | |
| 74 | APELLGGPSVFLFPPKPKDTLMISRTPEVTCVVVDVSHEDPEVKFNW | CH3C.18 variant |
| | YVDGVEVHNAKTKPREEQYNSTYRVVSVLTVLHQDWLNGKEYKCK | |
| | VSNKALPAPIEKTISKAKGQPREPQVYTLPPSRDELTKNQVSLTCLVK | |
| | GFYPSDIAVEWESLGHVWAVYFTTPPVLDSDGSFFLYSKLTVPKSTW | |
| | QQGWVFSCSVMHEALHNHYTQKSLSLSPGK | |
| 75 | APELLGGPSVFLFPPKPKDTLMISRTPEVTCVVVDVSHEDPEVKFNW | CH3C.18 variant |
| | YVDGVEVHNAKTKPREEQYNSTYRVVSVLTVLHQDWLNGKEYKCK | |
| | VSNKALPAPIEKTISKAKGQPREPQVYTLPPSRDELTKNQVSLTCLVK | |
| | GFYPSDIAVEWESLGHVWAVYHTTPPVLDSDGSFFLYSKLTVPKSTW | |
| | QQGWVFSCSVMHEALHNHYTQKSLSLSPGK | |
| 76 | APELLGGPSVFLFPPKPKDTLMISRTPEVTCVVVDVSHEDPEVKFNW | Clone CH3C.35.21.1 |
| | YVDGVEVHNAKTKPREEQYNSTYRVVSVLTVLHQDWLNGKEYKCK | |
| | VSNKALPAPIEKTISKAKGQPREPQVYTLPPSRDELTKNQVSLTCLVK | |
| | GFYPSDIAVLWESYGTEWSSYKTTPPVLDSDGSFFLYSKLTVTKSEW | |
| | QQGFVFSCSVMHEALHNHYTQKSLSLSPGK | |
| 77 | APELLGGPSVFLFPPKPKDTLMISRTPEVTCVVVDVSHEDPEVKFNW | Clone CH3C.35.21.2 |
| | YVDGVEVHNAKTKPREEQYNSTYRVVSVLTVLHQDWLNGKEYKCK | |
| | VSNKALPAPIEKTISKAKGQPREPQVYTLPPSRDELTKNQVSLTCLVK | |
| | GFYPSDIAVLWESYGTEWSSYRTTPPVLDSDGSFFLYSKLTVTKSEW | |
| | QQGFVFSCSVMHEALHNHYTQKSLSLSPGK | |
| 78 | APELLGGPSVFLFPPKPKDTLMISRTPEVTCVVVDVSHEDPEVKFNW | Clone CH3C.35.21.3 |
| | YVDGVEVHNAKTKPREEQYNSTYRVVSVLTVLHQDWLNGKEYKCK | |
| | VSNKALPAPIEKTISKAKGQPREPQVYTLPPSRDELTKNQVSLTCLVK | |
| | GFYPSDIAVLWESYGTEWSSYRTTPPVLDSDGSFFLYSKLTVTREEW | |
| | QQGFVFSCSVMHEALHNHYTQKSLSLSPGK | |
| 79 | APELLGGPSVFLFPPKPKDTLMISRTPEVTCVVVDVSHEDPEVKFNW | Clone CH3C.35.21.4 |
| | YVDGVEVHNAKTKPREEQYNSTYRVVSVLTVLHQDWLNGKEYKCK | |
| | VSNKALPAPIEKTISKAKGQPREPQVYTLPPSRDELTKNQVSLTCLVK | |
| | GFYPSDIAVLWESYGTEWSSYRTTPPVLDSDGSFFLYSKLTVTGEEW | |
| | QQGFVFSCSVMHEALHNHYTQKSLSLSPGK | |
| 80 | APELLGGPSVFLFPPKPKDTLMISRTPEVTCVVVDVSHEDPEVKFNW | Clone CH3C.35.21.5 |
| | YVDGVEVHNAKTKPREEQYNSTYRVVSVLTVLHQDWLNGKEYKCK | |
| | VSNKALPAPIEKTISKAKGQPREPQVYTLPPSRDELTKNQVSLTCLVK | |
| | GFYPSDIAVLWESYGTEWSSYRTTPPVLDSDGSFFLYSKLTVTREEW | |
| | QQGFVFSCWVMHEALHNHYTQKSLSLSPGK | |
| 81 | APELLGGPSVFLFPPKPKDTLMISRTPEVTCVVVDVSHEDPEVKFNW | Clone CH3C.35.21.6 |
| | YVDGVEVHNAKTKPREEQYNSTYRVVSVLTVLHQDWLNGKEYKCK | |
| | VSNKALPAPIEKTISKAKGQPREPQVYTLPPSRDELTKNQVSLTCLVK | |
| | GFYPSDIAVLWESYGTEWSSYRTTPPVLDSDGSFFLYSKLTVTKEEW | |
| | QQGFVFSCWVMHEALHNHYTQKSLSLSPGK | |
| 82 | APELLGGPSVFLFPPKPKDTLMISRTPEVTCVVVDVSHEDPEVKFNW | Clone CH3C.35.21.7 |
| | YVDGVEVHNAKTKPREEQYNSTYRVVSVLTVLHQDWLNGKEYKCK | |
| | VSNKALPAPIEKTISKAKGQPREPQVYTLPPSRDELTKNQVSLTCLVK | |
| | GFYPSDIAVLWESYGTEWSSYRTTPPVLDSDGSFFLYSKLTVTREEW | |
| | QQGFVFTCWVMHEALHNHYTQKSLSLSPGK | |
| 83 | APELLGGPSVFLFPPKPKDTLMISRTPEVTCVVVDVSHEDPEVKFNW | Clone CH3C.35.21.8 |
| | YVDGVEVHNAKTKPREEQYNSTYRVVSVLTVLHQDWLNGKEYKCK | |
| | VSNKALPAPIEKTISKAKGQPREPQVYTLPPSRDELTKNQVSLTCLVK | |
| | GFYPSDIAVLWESYGTEWSSYRTTPPVLDSDGSFFLYSKLTVTREEW | |
| | QQGFVFTCGVMHEALHNHYTQKSLSLSPGK | |
| 84 | APELLGGPSVFLFPPKPKDTLMISRTPEVTCVVVDVSHEDPEVKFNW | Clone CH3C.35.21.9 |
| | YVDGVEVHNAKTKPREEQYNSTYRVVSVLTVLHQDWLNGKEYKCK | |
| | VSNKALPAPIEKTISKAKGQPREPQVYTLPPSRDELTKNQVSLTCLVK | |
| | GFYPSDIAVLWESYGTEWSSYRTTPPVLDSDGSFFLYSKLTVTREEW | |
| | QQGFVFECWVMHEALHNHYTQKSLSLSPGK | |
| 85 | APELLGGPSVFLFPPKPKDTLMISRTPEVTCVVVDVSHEDPEVKFNW | Clone CH3C.35.21.10 |
| | YVDGVEVHNAKTKPREEQYNSTYRVVSVLTVLHQDWLNGKEYKCK | |
| | VSNKALPAPIEKTISKAKGQPREPQVYTLPPSRDELTKNQVSLTCLVK | |
| | GFYPSDIAVLWESYGTEWSSYRTTPPVLDSDGSFFLYSKLTVTREEW | |
| | QQGFVFKCWVMHEALHNHYTQKSLSLSPGK | |
| 86 | APELLGGPSVFLFPPKPKDTLMISRTPEVTCVVVDVSHEDPEVKFNW | Clone CH3C.35.21.11 |
| | YVDGVEVHNAKTKPREEQYNSTYRVVSVLTVLHQDWLNGKEYKCK | |
| | VSNKALPAPIEKTISKAKGQPREPQVYTLPPSRDELTKNQVSLTCLVK | |
| | GFYPSDIAVLWESYGTEWSSYRTTPPVLDSDGSFFLYSKLTVTPEEW | |
| | QQGFVFKCWVMHEALHNHYTQKSLSLSPGK | |
| 87 | APELLGGPSVFLFPPKPKDTLMISRTPEVTCVVVDVSHEDPEVKFNW | Clone CH3C.35.21.12 |
| | YVDGVEVHNAKTKPREEQYNSTYRVVSVLTVLHQDWLNGKEYKCK | |
| | VSNKALPAPIEKTISKAKGQPREPQVYTLPPSRDELTKNQVSLTCLVK | |
| | GFYPSDIAVWWESYGTEWSSYRTTPPVLDSDGSFFLYSKLTVTREEW | |
| | QQGFVFSCSVMHEALHNHYTQKSLSLSPGK | |
| 88 | APELLGGPSVFLFPPKPKDTLMISRTPEVTCVVVDVSHEDPEVKFNW | Clone CH3C.35.21.13 |
| | YVDGVEVHNAKTKPREEQYNSTYRVVSVLTVLHQDWLNGKEYKCK | |
| | VSNKALPAPIEKTISKAKGQPREPQVYTLPPSRDELTKNQVSLTCLVK | |
| | GFYPSDIAVWWESYGTEWSSYRTTPPVLDSDGSFFLYSKLTVTGEEW | |
| | QQGFVFSCSVMHEALHNHYTQKSLSLSPGK | |
| 89 | APELLGGPSVFLFPPKPKDTLMISRTPEVTCVVVDVSHEDPEVKFNW | Clone CH3C.35.21.14 |
| | YVDGVEVHNAKTKPREEQYNSTYRVVSVLTVLHQDWLNGKEYKCK | |
| | VSNKALPAPIEKTISKAKGQPREPQVYTLPPSRDELTKNQVSLTCLVK | |
| | GFYPSDIAVWWESYGTEWSSYRTTPPVLDSDGSFFLYSKLTVTREEW | |
| | QQGFVFTCWVMHEALHNHYTQKSLSLSPGK | |
| 90 | APELLGGPSVFLFPPKPKDTLMISRTPEVTCVVVDVSHEDPEVKFNW | Clone CH3C.35.21.15 |
| | YVDGVEVHNAKTKPREEQYNSTYRVVSVLTVLHQDWLNGKEYKCK | |
| | VSNKALPAPIEKTISKAKGQPREPQVYTLPPSRDELTKNQVSLTCLVK | |
| | GFYPSDIAVWWESYGTEWSSYRTTPPVLDSDGSFFLYSKLTVTGEEW | |
| | QQGFVFTCWVMHEALHNHYTQKSLSLSPGK | |
| 91 | APELLGGPSVFLFPPKPKDTLMISRTPEVTCVVVDVSHEDPEVKFNW | Clone CH3C.35.21.16 |
| | YVDGVEVHNAKTKPREEQYNSTYRVVSVLTVLHQDWLNGKEYKCK | |
| | VSNKALPAPIEKTISKAKGQPREPQVYTLPPSRDELTKNQVSLTCLVK | |
| | GFYPSDIAVWWESYGTEWSSYRTTPPVLDSDGSFFLYSKLTVTREEW | |
| | QQGFVFTCGVMHEALHNHYTQKSLSLSPGK | |
| 92 | APELLGGPSVFLFPPKPKDTLMISRTPEVTCVVVDVSHEDPEVKFNW | Clone CH3C.35.21.17 |
| | YVDGVEVHNAKTKPREEQYNSTYRVVSVLTVLHQDWLNGKEYKCK | |
| | VSNKALPAPIEKTISKAKGQPREPQVYTLPPSRDELTKNQVSLTCLVK | |
| | GFYPSDIAVLWESYGTEWSSYKTTPPVLDSDGSFFLYSKLTVTKEEW | |
| | QQGFVFSCSVMHEALHNHYTQKSLSLSPGK | |
| 93 | APELLGGPSVFLFPPKPKDTLMISRTPEVTCVVVDVSHEDPEVKFNW | Clone CH3C.35.21.18 |
| | YVDGVEVHNAKTKPREEQYNSTYRVVSVLTVLHQDWLNGKEYKCK | |
| | VSNKALPAPIEKTISKAKGQPREPQVYTLPPSRDELTKNQVSLTCLVK | |
| | GFYPSDIAVLWESYGTEWSSYRTTPPVLDSDGSFFLYSKLTVTKEEW | |
| | QQGFVFSCSVMHEALHNHYTQKSLSLSPGK | |
| 94 | APELLGGPSVFLFPPKPKDTLMISRTPEVTCVVVDVSHEDPEVKFNW | Clone CH3C.35.20.1 |
| | YVDGVEVHNAKTKPREEQYNSTYRVVSVLTVLHQDWLNGKEYKCK | |
| | VSNKALPAPIEKTISKAKGQPREPQVYTLPPSRDELTKNQVSLTCLVK | |
| | GFYPSDIAVEWESFGTEWSSYKTTPPVLDSDGSFFLYSKLTVTKEEW | |
| | QQGFVFSCSVMHEALHNHYTQKSLSLSPGK | |
| 95 | APELLGGPSVFLFPPKPKDTLMISRTPEVTCVVVDVSHEDPEVKFNW | Clone CH3C.35.20.2 |
| | YVDGVEVHNAKTKPREEQYNSTYRVVSVLTVLHQDWLNGKEYKCK | |
| | VSNKALPAPIEKTISKAKGQPREPQVYTLPPSRDELTKNQVSLTCLVK | |
| | GFYPSDIAVEWESYGTEWASYKTTPPVLDSDGSFFLYSKLTVTKEEW | |
| | QQGFVFSCSVMHEALHNHYTQKSLSLSPGK | |
| 96 | APELLGGPSVFLFPPKPKDTLMISRTPEVTCVVVDVSHEDPEVKFNW | Clone CH3C.35.20.3 |
| | YVDGVEVHNAKTKPREEQYNSTYRVVSVLTVLHQDWLNGKEYKCK | |
| | VSNKALPAPIEKTISKAKGQPREPQVYTLPPSRDELTKNQVSLTCLVK | |
| | GFYPSDIAVEWESYGTEWVSYKTTPPVLDSDGSFFLYSKLTVTKEEW | |
| | QQGFVFSCSVMHEALHNHYTQKSLSLSPGK | |
| 97 | APELLGGPSVFLFPPKPKDTLMISRTPEVTCVVVDVSHEDPEVKFNW | Clone CH3C.35.20.4 |
| | YVDGVEVHNAKTKPREEQYNSTYRVVSVLTVLHQDWLNGKEYKCK | |
| | VSNKALPAPIEKTISKAKGQPREPQVYTLPPSRDELTKNQVSLTCLVK | |
| | GFYPSDIAVEWESYGTEWSSYKTTPPVLDSDGSFFLYSKLTVSKEEW | |
| | QQGFVFSCSVMHEALHNHYTQKSLSLSPGK | |
| 98 | APELLGGPSVFLFPPKPKDTLMISRTPEVTCVVVDVSHEDPEVKFNW | Clone CH3C.35.20.5 |
| | YVDGVEVHNAKTKPREEQYNSTYRVVSVLTVLHQDWLNGKEYKCK | |
| | VSNKALPAPIEKTISKAKGQPREPQVYTLPPSRDELTKNQVSLTCLVK | |
| | GFYPSDIAVEWESFGTEWASYKTTPPVLDSDGSFFLYSKLTVTKEEW | |
| | QQGFVFSCSVMHEALHNHYTQKSLSLSPGK | |
| 99 | APELLGGPSVFLFPPKPKDTLMISRTPEVTCVVVDVSHEDPEVKFNW | Clone CH3C.35.20.6 |
| | YVDGVEVHNAKTKPREEQYNSTYRVVSVLTVLHQDWLNGKEYKCK | |
| | VSNKALPAPIEKTISKAKGQPREPQVYTLPPSRDELTKNQVSLTCLVK | |
| | GFYPSDIAVEWESFGTEWVSYKTTPPVLDSDGSFFLYSKLTVTKEEW | |
| | QQGFVFSCSVMHEALHNHYTQKSLSLSPGK | |
| 100 | APELLGGPSVFLFPPKPKDTLMISRTPEVTCVVVDVSHEDPEVKFNW | Clone CH3C.35.21.a.1 |
| | YVDGVEVHNAKTKPREEQYNSTYRVVSVLTVLHQDWLNGKEYKCK | |
| | VSNKALPAPIEKTISKAKGQPREPQVYTLPPSRDELTKNQVSLTCLVK | |
| | GFYPSDIAVWWESFGTEWSSYKTTPPVLDSDGSFFLYSKLTVTKEEW | |
| | QQGFVFSCSVMHEALHNHYTQKSLSLSPGK | |
| 101 | APELLGGPSVFLFPPKPKDTLMISRTPEVTCVVVDVSHEDPEVKFNW | Clone CH3C.35.21.a.2 |
| | YVDGVEVHNAKTKPREEQYNSTYRVVSVLTVLHQDWLNGKEYKCK | |
| | VSNKALPAPIEKTISKAKGQPREPQVYTLPPSRDELTKNQVSLTCLVK | |
| | GFYPSDIAVWWESYGTEWASYKTTPPVLDSDGSFFLYSKLTVTKEE | |
| | WQQGFVFSCSVMHEALHNHYTQKSLSLSPGK | |
| 102 | APELLGGPSVFLFPPKPKDTLMISRTPEVTCVVVDVSHEDPEVKFNW | Clone CH3C.35.21.a.3 |
| | YVDGVEVHNAKTKPREEQYNSTYRVVSVLTVLHQDWLNGKEYKCK | |
| | VSNKALPAPIEKTISKAKGQPREPQVYTLPPSRDELTKNQVSLTCLVK | |
| | GFYPSDIAVWWESYGTEWVSYKTTPPVLDSDGSFFLYSKLTVTKEE | |
| | WQQGFVFSCSVMHEALHNHYTQKSLSLSPGK | |
| 103 | APELLGGPSVFLFPPKPKDTLMISRTPEVTCVVVDVSHEDPEVKFNW | Clone CH3C.35.21.a.4 |
| | YVDGVEVHNAKTKPREEQYNSTYRVVSVLTVLHQDWLNGKEYKCK | |
| | VSNKALPAPIEKTISKAKGQPREPQVYTLPPSRDELTKNQVSLTCLVK | |
| | GFYPSDIAVWWESYGTEWSSYKTTPPVLDSDGSFFLYSKLTVSKEEW | |
| | QQGFVFSCSVMHEALHNHYTQKSLSLSPGK | |
| 104 | APELLGGPSVFLFPPKPKDTLMISRTPEVTCVVVDVSHEDPEVKFNW | Clone CH3C.35.21.a.5 |
| | YVDGVEVHNAKTKPREEQYNSTYRVVSVLTVLHQDWLNGKEYKCK | |
| | VSNKALPAPIEKTISKAKGQPREPQVYTLPPSRDELTKNQVSLTCLVK | |
| | GFYPSDIAVWWESFGTEWASYKTTPPVLDSDGSFFLYSKLTVTKEEW | |
| | QQGFVFSCSVMHEALHNHYTQKSLSLSPGK | |
| 105 | APELLGGPSVFLFPPKPKDTLMISRTPEVTCVVVDVSHEDPEVKFNW | Clone CH3C.35.21.a.6 |
| | YVDGVEVHNAKTKPREEQYNSTYRVVSVLTVLHQDWLNGKEYKCK | |
| | VSNKALPAPIEKTISKAKGQPREPQVYTLPPSRDELTKNQVSLTCLVK | |
| | GFYPSDIAVWWESFGTEWVSYKTTPPVLDSDGSFFLYSKLTVTKEEW | |
| | QQGFVFSCSVMHEALHNHYTQKSLSLSPGK | |
| 106 | APELLGGPSVFLFPPKPKDTLMISRTPEVTCVVVDVSHEDPEVKFNW | Clone CH3C.35.23.1 |
| | YVDGVEVHNAKTKPREEQYNSTYRVVSVLTVLHQDWLNGKEYKCK | |
| | VSNKALPAPIEKTISKAKGQPREPQVYTLPPSRDELTKNQVSLTCLVK | |
| | GFYPSDIAVEWESFGTEWSNYKTTPPVLDSDGSFFLYSKLTVTKEEW | |
| | QQGFVFSCSVMHEALHNHYTQKSLSLSPGK | |
| 107 | APELLGGPSVFLFPPKPKDTLMISRTPEVTCVVVDVSHEDPEVKFNW | Clone CH3C.35.23.2 |
| | YVDGVEVHNAKTKPREEQYNSTYRVVSVLTVLHQDWLNGKEYKCK | |
| | VSNKALPAPIEKTISKAKGQPREPQVYTLPPSRDELTKNQVSLTCLVK | |
| | GFYPSDIAVEWESYGTEWANYKTTPPVLDSDGSFFLYSKLTVTKEEW | |
| | QQGFVFSCSVMHEALHNHYTQKSLSLSPGK | |
| 108 | APELLGGPSVFLFPPKPKDTLMISRTPEVTCVVVDVSHEDPEVKFNW | Clone CH3C.35.23.3 |
| | YVDGVEVHNAKTKPREEQYNSTYRVVSVLTVLHQDWLNGKEYKCK | |
| | VSNKALPAPIEKTISKAKGQPREPQVYTLPPSRDELTKNQVSLTCLVK | |
| | GFYPSDIAVEWESYGTEWVNYKTTPPVLDSDGSFFLYSKLTVTKEEW | |
| | QQGFVFSCSVMHEALHNHYTQKSLSLSPGK | |
| 109 | APELLGGPSVFLFPPKPKDTLMISRTPEVTCVVVDVSHEDPEVKFNW | Clone CH3C.35.23.4 |
| | YVDGVEVHNAKTKPREEQYNSTYRVVSVLTVLHQDWLNGKEYKCK | |
| | VSNKALPAPIEKTISKAKGQPREPQVYTLPPSRDELTKNQVSLTCLVK | |
| | GFYPSDIAVEWESYGTEWSNYKTTPPVLDSDGSFFLYSKLTVSKEEW | |
| | QQGFVFSCSVMHEALHNHYTQKSLSLSPGK | |
| 110 | APELLGGPSVFLFPPKPKDTLMISRTPEVTCVVVDVSHEDPEVKFNW | Clone CH3C.35.23.5 |
| | YVDGVEVHNAKTKPREEQYNSTYRVVSVLTVLHQDWLNGKEYKCK | |
| | VSNKALPAPIEKTISKAKGQPREPQVYTLPPSRDELTKNQVSLTCLVK | |
| | GFYPSDIAVEWESFGTEWANYKTTPPVLDSDGSFFLYSKLTVTKEEW | |
| | QQGFVFSCSVMHEALHNHYTQKSLSLSPGK | |
| 111 | APELLGGPSVFLFPPKPKDTLMISRTPEVTCVVVDVSHEDPEVKFNW | Clone CH3C.35.23.6 |
| | YVDGVEVHNAKTKPREEQYNSTYRVVSVLTVLHQDWLNGKEYKCK | |
| | VSNKALPAPIEKTISKAKGQPREPQVYTLPPSRDELTKNQVSLTCLVK | |
| | GFYPSDIAVEWESFGTEWVNYKTTPPVLDSDGSFFLYSKLTVTKEEW | |
| | QQGFVFSCSVMHEALHNHYTQKSLSLSPGK | |
| 112 | APELLGGPSVFLFPPKPKDTLMISRTPEVTCVVVDVSHEDPEVKFNW | Clone CH3C.35.24.1 |
| | YVDGVEVHNAKTKPREEQYNSTYRVVSVLTVLHQDWLNGKEYKCK | |
| | VSNKALPAPIEKTISKAKGQPREPQVYTLPPSRDELTKNQVSLTCLVK | |
| | GFYPSDIAVWWESFGTEWSNYKTTPPVLDSDGSFFLYSKLTVTKEEW | |
| | QQGFVFSCSVMHEALHNHYTQKSLSLSPGK | |
| 113 | APELLGGPSVFLFPPKPKDTLMISRTPEVTCVVVDVSHEDPEVKFNW | Clone CH3C.35.24.2 |
| | YVDGVEVHNAKTKPREEQYNSTYRVVSVLTVLHQDWLNGKEYKCK | |
| | VSNKALPAPIEKTISKAKGQPREPQVYTLPPSRDELTKNQVSLTCLVK | |
| | GFYPSDIAVWWESYGTEWANYKTTPPVLDSDGSFFLYSKLTVTKEE | |
| | WQQGFVFSCSVMHEALHNHYTQKSLSLSPGK | |
| 114 | APELLGGPSVFLFPPKPKDTLMISRTPEVTCVVVDVSHEDPEVKFNW | Clone CH3C.35.24.3 |
| | YVDGVEVHNAKTKPREEQYNSTYRVVSVLTVLHQDWLNGKEYKCK | |
| | VSNKALPAPIEKTISKAKGQPREPQVYTLPPSRDELTKNQVSLTCLVK | |
| | GFYPSDIAVWWESYGTEWVNYKTTPPVLDSDGSFFLYSKLTVTKEE | |
| | WQQGFVFSCSVMHEALHNHYTQKSLSLSPGK | |
| 115 | APELLGGPSVFLFPPKPKDTLMISRTPEVTCVVVDVSHEDPEVKFNW | Clone CH3C.35.24.4 |
| | YVDGVEVHNAKTKPREEQYNSTYRVVSVLTVLHQDWLNGKEYKCK | |
| | VSNKALPAPIEKTISKAKGQPREPQVYTLPPSRDELTKNQVSLTCLVK | |
| | GFYPSDIAVWWESYGTEWSNYKTTPPVLDSDGSFFLYSKLTVSKEEW | |
| | QQGFVFSCSVMHEALHNHYTQKSLSLSPGK | |
| 116 | APELLGGPSVFLFPPKPKDTLMISRTPEVTCVVVDVSHEDPEVKFNW | Clone CH3C.35.24.5 |
| | YVDGVEVHNAKTKPREEQYNSTYRVVSVLTVLHQDWLNGKEYKCK | |
| | VSNKALPAPIEKTISKAKGQPREPQVYTLPPSRDELTKNQVSLTCLVK | |
| | GFYPSDIAVWWESFGTEWANYKTTPPVLDSDGSFFLYSKLTVTKEE | |
| | WQQGFVFSCSVMHEALHNHYTQKSLSLSPGK | |
| 117 | APELLGGPSVFLFPPKPKDTLMISRTPEVTCVVVDVSHEDPEVKFNW | Clone CH3C.35.24.6 |
| | YVDGVEVHNAKTKPREEQYNSTYRVVSVLTVLHQDWLNGKEYKCK | |
| | VSNKALPAPIEKTISKAKGQPREPQVYTLPPSRDELTKNQVSLTCLVK | |
| | GFYPSDIAVWWESFGTEWVNYKTTPPVLDSDGSFFLYSKLTVTKEE | |
| | WQQGFVFSCSVMHEALHNHYTQKSLSLSPGK | |
| 118 | APELLGGPSVFLFPPKPKDTLMISRTPEVTCVVVDVSHEDPEVKFNW | Clone CH3C.35.21.17.1 |
| | YVDGVEVHNAKTKPREEQYNSTYRVVSVLTVLHQDWLNGKEYKCK | |
| | VSNKALPAPIEKTISKAKGQPREPQVYTLPPSRDELTKNQVSLTCLVK | |
| | GFYPSDIAVLWESFGTEWSSYKTTPPVLDSDGSFFLYSKLTVTKEEW | |
| | QQGFVFSCSVMHEALHNHYTQKSLSLSPGK | |
| 119 | APELLGGPSVFLFPPKPKDTLMISRTPEVTCVVVDVSHEDPEVKFNW | Clone CH3C.35.21.17.2 |
| | YVDGVEVHNAKTKPREEQYNSTYRVVSVLTVLHQDWLNGKEYKCK | |
| | VSNKALPAPIEKTISKAKGQPREPQVYTLPPSRDELTKNQVSLTCLVK | |
| | GFYPSDIAVLWESYGTEWASYKTTPPVLDSDGSFFLYSKLTVTKEEW | |
| | QQGFVFSCSVMHEALHNHYTQKSLSLSPGK | |
| 120 | APELLGGPSVFLFPPKPKDTLMISRTPEVTCVVVDVSHEDPEVKFNW | Clone CH3C.35.21.17.3 |
| | YVDGVEVHNAKTKPREEQYNSTYRVVSVLTVLHQDWLNGKEYKCK | |
| | VSNKALPAPIEKTISKAKGQPREPQVYTLPPSRDELTKNQVSLTCLVK | |
| | GFYPSDIAVLWESYGTEWVSYKTTPPVLDSDGSFFLYSKLTVTKEEW | |
| | QQGFVFSCSVMHEALHNHYTQKSLSLSPGK | |
| 121 | APELLGGPSVFLFPPKPKDTLMISRTPEVTCVVVDVSHEDPEVKFNW | Clone CH3C.35.21.17.4 |
| | YVDGVEVHNAKTKPREEQYNSTYRVVSVLTVLHQDWLNGKEYKCK | |
| | VSNKALPAPIEKTISKAKGQPREPQVYTLPPSRDELTKNQVSLTCLVK | |
| | GFYPSDIAVLWESYGTEWSSYKTTPPVLDSDGSFFLYSKLTVSKEEW | |
| | QQGFVFSCSVMHEALHNHYTQKSLSLSPGK | |
| 122 | APELLGGPSVFLFPPKPKDTLMISRTPEVTCVVVDVSHEDPEVKFNW | Clone CH3C.35.21.17.5 |
| | YVDGVEVHNAKTKPREEQYNSTYRVVSVLTVLHQDWLNGKEYKCK | |
| | VSNKALPAPIEKTISKAKGQPREPQVYTLPPSRDELTKNQVSLTCLVK | |
| | GFYPSDIAVLWESFGTEWASYKTTPPVLDSDGSFFLYSKLTVTKEEW | |
| | QQGFVFSCSVMHEALHNHYTQKSLSLSPGK | |
| 123 | APELLGGPSVFLFPPKPKDTLMISRTPEVTCVVVDVSHEDPEVKFNW | Clone CH3C.35.21.17.6 |
| | YVDGVEVHNAKTKPREEQYNSTYRVVSVLTVLHQDWLNGKEYKCK | |
| | VSNKALPAPIEKTISKAKGQPREPQVYTLPPSRDELTKNQVSLTCLVK | |
| | GFYPSDIAVLWESFGTEWVSYKTTPPVLDSDGSFFLYSKLTVTKEEW | |
| | QQGFVFSCSVMHEALHNHYTQKSLSLSPGK | |
| 124 | APELLGGPSVFLFPPKPKDTLMISRTPEVTCVVVDVSHEDPEVKFNW | Clone CH3C.35.N390 |
| | YVDGVEVHNAKTKPREEQYNSTYRVVSVLTVLHQDWLNGKEYKCK | |
| | VSNKALPAPIEKTISKAKGQPREPQVYTLPPSRDELTKNQVSLTCLVK | |
| | GFYPSDIAVEWESYGTEWSNYKTTPPVLDSDGSFFLYSKLTVTKSEW | |
| | QQGFVFSCSVMHEALHNHYTQKSLSLSPGK | |
| 125 | APELLGGPSVFLFPPKPKDTLMISRTPEVTCVVVDVSHEDPEVKFNW | Clone CH3C.35.16 |
| | YVDGVEVHNAKTKPREEQYNSTYRVVSVLTVLHQDWLNGKEYKCK | |
| | VSNKALPAPIEKTISKAKGQPREPQVYTLPPSRDELTKNQVSLTCLVK | |
| | GFYPSDIAVWWESLGHVWVNQKTTPPVLDSDGSFFLYSKLTVPKST | |
| | WQQGWVFSCSVMHEALHNHYTQKSLSLSPGK | |
| 126 | APELLGGPSVFLFPPKPKDTLMISRTPEVTCVVVDVSHEDPEVKFNW | Clone CH3 C.35.17 |
| | YVDGVEVHNAKTKPREEQYNSTYRVVSVLTVLHQDWLNGKEYKCK | |
| | VSNKALPAPIEKTISKAKGQPREPQVYTLPPSRDELTKNQVSLTCLVK | |
| | GFYPSDIAVEWESLGHVWVNQQTTPPVLDSDGSFFLYSKLTVPKSTW | |
| | QQGWVFSCSVMHEALHNHYTQKSLSLSPGK | |
| 127 | APELLGGPSVFLFPPKPKDTLMISRTPEVTCVVVDVSHEDPEVKFNW | Clone CH3 C.35.18 |
| | YVDGVEVHNAKTKPREEQYNSTYRVVSVLTVLHQDWLNGKEYKCK | |
| | VSNKALPAPIEKTISKAKGQPREPQVYTLPPSRDELTKNQVSLTCLVK | |
| | GFYPSDIAVWWESLGHVWVNQQTTPPVLDSDGSFFLYSKLTVPKST | |
| | WQQGWVFSCSVMHEALHNHYTQKSLSLSPGK | |
| 128 | MMDQARSAFSNLFGGEPLSYTRFSLARQVDGDNSHVEMKLGVDEEE | Cyno TfR |
| | NTDNNTKANGTKPKRCGGNICYGTIAVIIFFLIGFMIGYLGYCKGVEP | |
| | KTECERLAGTESPAREEPEEDFPAAPRLYWDDLKRKLSEKLDTTDFT | |
| | STIKLLNENLYVPREAGSQKDENLALYIENQFREFKLSKVWRDQHFV | |
| | KIQVKDSAQNSVIIVDKNGGLVYLVENPGGYVAYSKAATVTGKLVH | |
| | ANFGTKKDFEDLDSPVNGSIVIVRAGKITFAEKVANAESLNAIGVLIY | |
| | MDQTKFPIVKADLSFFGHAHLGTGDPYTPGFPSFNHTQFPPSQSSGLP | |
| | NIPVQTISRAAAEKLFGNMEGDCPSDWKTDSTCKMVTSENKSVKLT | |
| | VSNVLKETKILNIFGVIKGFVEPDHYVVVGAQRDAWGPGAAKSSVG | |
| | TALLLKLAQMFSDMVLKDGFQPSRSIIFASWSAGDFGSVGATEWLEG | |
| | YLSSLHLKAFTYINLDKAVLGTSNFKVSASPLLYTLIEKTMQDVKHP | |
| | VTGRSLYQDSNWASKVEKLTLDNAAFPFLAYSGIPAVSFCFCEDTDY | |
| | PYLGTTMDTYKELVERIPELNKVARAAAEVAGQFVIKLTHDTELNLD | |
| | YERYNSQLLLFLRDLNQYRADVKEMGLSLQWLYSARGDFFRATSRL | |
| | TTDFRNAEKRDKFVMKKLNDRVMRVEYYFLSPYVSPKESPFRHVFW | |
| | GSGSHTLSALLESLKLRRQNNSAFNETLFRNQLALATWTIQGAANAL | |
| | SGDVWDIDNEF | |
| 129 | MGWSCIILFLVATATGAYAGTSSGLPNIPVQTISRAAAEKLFGNMEG | His-tagged permutated |
| | DCPSDWKTDSTCRMVTSESKNVKLTVSNDSAQNSVIIVDKNGRLVY | TfR apical domain |
| | LVENPGGYVAYSKAATVTGKLVHANFGTKKDFEDLYTPVNGSIVIV | |
| | RAGKITFAEKVANAESLNAIGVLIYMDQTKFPIVNAELSASHHHHHH | |
| 130 | METDTLLLWVLLLWVPGSTGDKTHTCPAPEAAGGPSVFLFPPKPKDT | Expressed CH3C.18 Fc |
| | LYITREPEVTCVVVDVSHEDPEVKFNWYVDGVEVHNAKTKPREEQY | sequence |
| | NSTYRVVSVLTVLHQDWLNGKEYKCKVSNKALGAPIEKTISKAKGQ | |
| | PREPQVYTLPPSRDELTKNQVSLTCLVKGFYPSDIAVEWESLGHVWA | |
| | VYKTTPPVLDSDGSFFLYSKLTVPKSTWQQGWVFSCSVMHEALHNH | |
| | YTQKSLSLSPGK | |
| 131 | EWESFGTEWSS | CH3C modified binding |
| | | sequence |
| 132 | EWESYGTEWAS | CH3C modified binding |
| | | sequence |
| 133 | EWESYGTEWVS | CH3C modified binding |
| | | sequence |
| 134 | EWESYGTEWSS | CH3C modified binding |
| | | sequence |
| 135 | EWESFGTEWAS | CH3C modified binding |
| | | sequence |
| 136 | EWESFGTEWVS | CH3C modified binding |
| | | sequence |
| 137 | WWESFGTEWSS | CH3C modified binding |
| | | sequence |
| 138 | WWESYGTEWAS | CH3C modified binding |
| | | sequence |
| 139 | WWESYGTEWVS | CH3C modified binding |
| | | sequence |
| 140 | WWESYGTEWSS | CH3C modified binding |
| | | sequence |
| 141 | WWESFGTEWAS | CH3C modified binding |
| | | sequence |
| 142 | WWESFGTEWVS | CH3C modified binding |
| | | sequence |
| 143 | EWESFGTEWSN | CH3C modified binding |
| | | sequence |
| 144 | EWESYGTEWAN | CH3C modified binding |
| | | sequence |
| 145 | EWESYGTEWVN | CH3C modified binding |
| | | sequence |
| 146 | EWESYGTEWSN | CH3C modified binding |
| | | sequence |
| 147 | EWESFGTEWAN | CH3C modified binding |
| | | sequence |
| 148 | EWESFGTEWVN | CH3C modified binding |
| | | sequence |
| 149 | WWESFGTEWSN | CH3C modified binding |
| | | sequence |
| 150 | WWESYGTEWAN | CH3C modified binding |
| | | sequence |
| 151 | WWESYGTEWVN | CH3C modified binding |
| | | sequence |
| 152 | WWESYGTEWSN | CH3C modified binding |
| | | sequence |
| 153 | WWESFGTEWAN | CH3C modified binding |
| | | sequence |
| 154 | WWESFGTEWVN | CH3C modified binding |
| | | sequence |
| 155 | LWESFGTEWSS | CH3C modified binding |
| | | sequence |
| 156 | LWESYGTEWAS | CH3C modified binding |
| | | sequence |
| 157 | LWESYGTEWVS | CH3C modified binding |
| | | sequence |
| 158 | LWESYGTEWSS | CH3C modified binding |
| | | sequence |
| 159 | LWESFGTEWAS | CH3C modified binding |
| | | sequence |
| 160 | LWESFGTEWVS | CH3C modified binding |
| | | sequence |
| 161 | WWESLGHVWAV | CH3C modified binding |
| | | sequence |
| 162 | EWESLGHVWAV | CH3C modified binding |
| | | sequence |
| 163 | LWESLGHVWAV | CH3C modified binding |
| | | sequence |
| 164 | YWESLGHVWAV | CH3C modified binding |
| | | sequence |
| 165 | EWESLGLVWVF | CH3C modified binding |
| | | sequence |
| 166 | WWESLGHVWVN | CH3C modified binding |
| | | sequence |
| 167 | EWESLGHVWVN | CH3C modified binding |
| | | sequence |
| 168 | TKEEWQQGF | CH3C modified binding |
| | | sequence |
| 169 | SKEEWQQGF | CH3C modified binding |
| | | sequence |
| 170 | PKTSWQQGW | CH3C modified binding |
| | | sequence |
| 171 | TREEWQQGF | CH3C modified binding |
| | | sequence |
| 172 | TPEEWQQGF | CH3C modified binding |
| | | sequence |
| 173 | TGEEWQQGF | CH3C modified binding |
| | | sequence |
| 174 | TVXKXXWQQGXV | Second portion CH3C |
| | | register |
| 175 | APEAAGGPSVFLFPPKPKDTLYITREPEVTCVVVDVSHEDPEVKFNW | Clone CH3C.35.8 |
| | YVDGVEVHNAKTKPREEQYNSTYRVVSVLTVLHQDWLNGKEYKCK | (Clone CH3C.35.20 with |
| | VSNKALGAPIEKTISKAKGQPREPQVYTLPPSRDELTKNQVSLTCLVK | YTE and LALAPG |
| | GFYPSDIAVEWESYGTEWSSYKTTPPVLDSDGSFFLYSKLTVTKEEW | mutations) |
| | QQGFVFSCSVMHEALHNHYTQKSLSLSPGK | |
| 176 | APEAAGGPSVFLFPPKPKDTLYITREPEVTCVVVDVSHEDPEVKFNW | Clone CH3C.35.9 |
| | YVDGVEVHNAKTKPREEQYNSTYRVVSVLTVLHQDWLNGKEYKCK | (Clone CH3C.35.21 with |
| | VSNKALGAPIEKTISKAKGQPREPQVYTLPPSRDELTKNQVSLTCLVK | YTE and LALAPG |
| | GFYPSDIAVEWESFGTEWSSYKTTPPVLDSDGSFFLYSKLTVTKEEW | mutations) |
| | QQGFVFSCSVMHEALHNHYTQKSLSLSPGK | |
| 177 | APELLGGPSVFLFPPKPKDTLMISRTPEVTCVVVDVSHEDPEVKFNW | Clone CH3C.35.20.1 with |
| | YVDGVEVHNAKTKPREEQYNSTYRVVSVLTVLHQDWLNGKEYKCK | knob mutation |
| | VSNKALPAPIEKTISKAKGQPREPQVYTLPPSRDELTKNQVSLWCLVK | |
| | GFYPSDIAVEWESFGTEWSSYKTTPPVLDSDGSFFLYSKLTVTKEEW | |
| | QQGFVFSCSVMHEALHNHYTQKSLSLSPGK | |
| 178 | APEAAGGPSVFLFPPKPKDTLMISRTPEVTCVVVDVSHEDPEVKFNW | Clone CH3C.35.20.1 with |
| | YVDGVEVHNAKTKPREEQYNSTYRVVSVLTVLHQDWLNGKEYKCK | knob and LALA mutations |
| | VSNKALPAPIEKTISKAKGQPREPQVYTLPPSRDELTKNQVSLWCLVK | |
| | GFYPSDIAVEWESFGTEWSSYKTTPPVLDSDGSFFLYSKLTVTKEEW | |
| | QQGFVFSCSVMHEALHNHYTQKSLSLSPGK | |
| 179 | APEAAGGPSVFLFPPKPKDTLMISRTPEVTCVVVDVSHEDPEVKFNW | Clone CH3C.35.20.1 with |
| | YVDGVEVHNAKTKPREEQYNSTYRVVSVLTVLHQDWLNGKEYKCK | knob and LALAPG |
| | VSNKALGAPIEKTISKAKGQPREPQVYTLPPSRDELTKNQVSLWCLV | mutations |
| | KGFYPSDIAVEWESFGTEWSSYKTTPPVLDSDGSFFLYSKLTVTKEE | |
| | WQQGFVFSCSVMHEALHNHYTQKSLSLSPGK | |
| 180 | APELLGGPSVFLFPPKPKDTLYITREPEVTCVVVDVSHEDPEVKFNWY | Clone CH3C.35.20.1 with |
| | VDGVEVHNAKTKPREEQYNSTYRVVSVLTVLHQDWLNGKEYKCKV | knob and YTE mutations |
| | SNKALPAPIEKTISKAKGQPREPQVYTLPPSRDELTKNQVSLWCLVKG | |
| | FYPSDIAVEWESFGTEWSSYKTTPPVLDSDGSFFLYSKLTVTKEEWQ | |
| | QGFVFSCSVMHEALHNHYTQKSLSLSPGK | |
| 181 | APEAAGGPSVFLFPPKPKDTLYITREPEVTCVVVDVSHEDPEVKFNW | Clone CH3C.35.20.1 with |
| | YVDGVEVHNAKTKPREEQYNSTYRVVSVLTVLHQDWLNGKEYKCK | knob, LALA, and YTE |
| | VSNKALPAPIEKTISKAKGQPREPQVYTLPPSRDELTKNQVSLWCLVK | mutations |
| | GFYPSDIAVEWESFGTEWSSYKTTPPVLDSDGSFFLYSKLTVTKEEW | |
| | QQGFVFSCSVMHEALHNHYTQKSLSLSPGK | |
| 182 | APEAAGGPSVFLFPPKPKDTLYITREPEVTCVVVDVSHEDPEVKFNW | Clone CH3C.35.20.1 with |
| | YVDGVEVHNAKTKPREEQYNSTYRVVSVLTVLHQDWLNGKEYKCK | knob, LALAPG, and YTE |
| | VSNKALGAPIEKTISKAKGQPREPQVYTLPPSRDELTKNQVSLWCLV | mutations |
| | KGFYPSDIAVEWESFGTEWSSYKTTPPVLDSDGSFFLYSKLTVTKEE | |
| | WQQGFVFSCSVMHEALHNHYTQKSLSLSPGK | |
| 183 | APELLGGPSVFLFPPKPKDTLMISRTPEVTCVVVDVSHEDPEVKFNW | Clone CH3C.35.20.1 with |
| | YVDGVEVHNAKTKPREEQYNSTYRVVSVLTVLHQDWLNGKEYKCK | hole mutations |
| | VSNKALPAPIEKTISKAKGQPREPQVYTLPPSRDELTKNQVSLSCAVK | |
| | GFYPSDIAVEWESFGTEWSSYKTTPPVLDSDGSFFLVSKLTVTKEEW | |
| | QQGFVFSCSVMHEALHNHYTQKSLSLSPGK | |
| 184 | APEAAGGPSVFLFPPKPKDTLMISRTPEVTCVVVDVSHEDPEVKFNW | Clone CH3C.35.20.1 with |
| | YVDGVEVHNAKTKPREEQYNSTYRVVSVLTVLHQDWLNGKEYKCK | hole and LALA mutations |
| | VSNKALPAPIEKTISKAKGQPREPQVYTLPPSRDELTKNQVSLSCAVK | |
| | GFYPSDIAVEWESFGTEWSSYKTTPPVLDSDGSFFLVSKLTVTKEEW | |
| | QQGFVFSCSVMHEALHNHYTQKSLSLSPGK | |
| 185 | APEAAGGPSVFLFPPKPKDTLMISRTPEVTCVVVDVSHEDPEVKFNW | Clone CH3C.35.20.1 with |
| | YVDGVEVHNAKTKPREEQYNSTYRVVSVLTVLHQDWLNGKEYKCK | hole and LALAPG |
| | VSNKALGAPIEKTISKAKGQPREPQVYTLPPSRDELTKNQVSLSCAVK | mutations |
| | GFYPSDIAVEWESFGTEWSSYKTTPPVLDSDGSFFLVSKLTVTKEEW | |
| | QQGFVFSCSVMHEALHNHYTQKSLSLSPGK | |
| 186 | APELLGGPSVFLFPPKPKDTLYITREPEVTCVVVDVSHEDPEVKFNWY | Clone CH3C.35.20.1 with |
| | VDGVEVHNAKTKPREEQYNSTYRVVSVLTVLHQDWLNGKEYKCKV | hole and YTE mutations |
| | SNKALPAPIEKTISKAKGQPREPQVYTLPPSRDELTKNQVSLSCAVKG | |
| | FYPSDIAVEWESFGTEWSSYKTTPPVLDSDGSFFLVSKLTVTKEEWQ | |
| | QGFVFSCSVMHEALHNHYTQKSLSLSPGK | |
| 187 | APEAAGGPSVFLFPPKPKDTLYITREPEVTCVVVDVSHEDPEVKFNW | Clone CH3C.35.20.1 with |
| | YVDGVEVHNAKTKPREEQYNSTYRVVSVLTVLHQDWLNGKEYKCK | hole, LALA, and YTE |
| | VSNKALPAPIEKTISKAKGQPREPQVYTLPPSRDELTKNQVSLSCAVK | mutations |
| | GFYPSDIAVEWESFGTEWSSYKTTPPVLDSDGSFFLVSKLTVTKEEW | |
| | QQGFVFSCSVMHEALHNHYTQKSLSLSPGK | |
| 188 | APEAAGGPSVFLFPPKPKDTLYITREPEVTCVVVDVSHEDPEVKFNW | Clone CH3C.35.20.1 with |
| | YVDGVEVHNAKTKPREEQYNSTYRVVSVLTVLHQDWLNGKEYKCK | hole, LALAPG, and YTE |
| | VSNKALGAPIEKTISKAKGQPREPQVYTLPPSRDELTKNQVSLSCAVK | mutations |
| | GFYPSDIAVEWESFGTEWSSYKTTPPVLDSDGSFFLVSKLTVTKEEW | |
| | QQGFVFSCSVMHEALHNHYTQKSLSLSPGK | |
| 189 | APELLGGPSVFLFPPKPKDTLMISRTPEVTCVVVDVSHEDPEVKFNW | Clone CH3C.35.23.2 with |
| | YVDGVEVHNAKTKPREEQYNSTYRVVSVLTVLHQDWLNGKEYKCK | knob mutation |
| | VSNKALPAPIEKTISKAKGQPREPQVYTLPPSRDELTKNQVSLWCLVK | |
| | GFYPSDIAVEWESYGTEWANYKTTPPVLDSDGSFFLYSKLTVTKEEW | |
| | QQGFVFSCSVMHEALHNHYTQKSLSLSPGK | |
| 190 | APEAAGGPSVFLFPPKPKDTLMISRTPEVTCVVVDVSHEDPEVKFNW | Clone CH3C.35.23.2 with |
| | YVDGVEVHNAKTKPREEQYNSTYRVVSVLTVLHQDWLNGKEYKCK | knob and LALA mutations |
| | VSNKALPAPIEKTISKAKGQPREPQVYTLPPSRDELTKNQVSLWCLVK | |
| | GFYPSDIAVEWESYGTEWANYKTTPPVLDSDGSFFLYSKLTVTKEEW | |
| | QQGFVFSCSVMHEALHNHYTQKSLSLSPGK | |
| 191 | APEAAGGPSVFLFPPKPKDTLMISRTPEVTCVVVDVSHEDPEVKFNW | Clone CH3C.35.23.2 with |
| | YVDGVEVHNAKTKPREEQYNSTYRVVSVLTVLHQDWLNGKEYKCK | knob and LALAPG |
| | VSNKALGAPIEKTISKAKGQPREPQVYTLPPSRDELTKNQVSLWCLV | mutations |
| | KGFYPSDIAVEWESYGTEWANYKTTPPVLDSDGSFFLYSKLTVTKEE | |
| | WQQGFVFSCSVMHEALHNHYTQKSLSLSPGK | |
| 192 | APELLGGPSVFLFPPKPKDTLYITREPEVTCVVVDVSHEDPEVKFNWY | Clone CH3C.35.23.2 with |
| | VDGVEVHNAKTKPREEQYNSTYRVVSVLTVLHQDWLNGKEYKCKV | knob and YTE mutations |
| | SNKALPAPIEKTISKAKGQPREPQVYTLPPSRDELTKNQVSLWCLVKG | |
| | FYPSDIAVEWESYGTEWANYKTTPPVLDSDGSFFLYSKLTVTKEEWQ | |
| | QGFVFSCSVMHEALHNHYTQKSLSLSPGK | |
| 193 | APEAAGGPSVFLFPPKPKDTLYITREPEVTCVVVDVSHEDPEVKFNW | Clone CH3C.35.23.2 with |
| | YVDGVEVHNAKTKPREEQYNSTYRVVSVLTVLHQDWLNGKEYKCK | knob, LALA, and YTE |
| | VSNKALPAPIEKTISKAKGQPREPQVYTLPPSRDELTKNQVSLWCLVK | mutations |
| | GFYPSDIAVEWESYGTEWANYKTTPPVLDSDGSFFLYSKLTVTKEEW | |
| | QQGFVFSCSVMHEALHNHYTQKSLSLSPGK | |
| 194 | APEAAGGPSVFLFPPKPKDTLYITREPEVTCVVVDVSHEDPEVKFNW | Clone CH3C.35.23.2 with |
| | YVDGVEVHNAKTKPREEQYNSTYRVVSVLTVLHQDWLNGKEYKCK | knob, LALAPG, and YTE |
| | VSNKALGAPIEKTISKAKGQPREPQVYTLPPSRDELTKNQVSLWCLV | mutations |
| | KGFYPSDIAVEWESYGTEWANYKTTPPVLDSDGSFFLYSKLTVTKEE | |
| | WQQGFVFSCSVMHEALHNHYTQKSLSLSPGK | |
| 195 | APELLGGPSVFLFPPKPKDTLMISRTPEVTCVVVDVSHEDPEVKFNW | Clone CH3C.35.23.2 with |
| | YVDGVEVHNAKTKPREEQYNSTYRVVSVLTVLHQDWLNGKEYKCK | hole mutations |
| | VSNKALPAPIEKTISKAKGQPREPQVYTLPPSRDELTKNQVSLSCAVK | |
| | GFYPSDIAVEWESYGTEWANYKTTPPVLDSDGSFFLVSKLTVTKEEW | |
| | QQGFVFSCSVMHEALHNHYTQKSLSLSPGK | |
| 196 | APEAAGGPSVFLFPPKPKDTLMISRTPEVTCVVVDVSHEDPEVKFNW | Clone CH3C.35.23.2 with |
| | YVDGVEVHNAKTKPREEQYNSTYRVVSVLTVLHQDWLNGKEYKCK | hole and LALA mutations |
| | VSNKALPAPIEKTISKAKGQPREPQVYTLPPSRDELTKNQVSLSCAVK | |
| | GFYPSDIAVEWESYGTEWANYKTTPPVLDSDGSFFLVSKLTVTKEEW | |
| | QQGFVFSCSVMHEALHNHYTQKSLSLSPGK | |
| 197 | APEAAGGPSVFLFPPKPKDTLMISRTPEVTCVVVDVSHEDPEVKFNW | Clone CH3C.35.23.2 with |
| | YVDGVEVHNAKTKPREEQYNSTYRVVSVLTVLHQDWLNGKEYKCK | hole and LALAPG |
| | VSNKALGAPIEKTISKAKGQPREPQVYTLPPSRDELTKNQVSLSCAVK | mutations |
| | GFYPSDIAVEWESYGTEWANYKTTPPVLDSDGSFFLVSKLTVTKEEW | |
| | QQGFVFSCSVMHEALHNHYTQKSLSLSPGK | |
| 198 | APELLGGPSVFLFPPKPKDTLYITREPEVTCVVVDVSHEDPEVKFNWY | Clone CH3C.35.23.2 with |
| | VDGVEVHNAKTKPREEQYNSTYRVVSVLTVLHQDWLNGKEYKCKV | hole and YTE mutations |
| | SNKALPAPIEKTISKAKGQPREPQVYTLPPSRDELTKNQVSLSCAVKG | |
| | FYPSDIAVEWESYGTEWANYKTTPPVLDSDGSFFLVSKLTVTKEEWQ | |
| | QGFVFSCSVMHEALHNHYTQKSLSLSPGK | |
| 199 | APEAAGGPSVFLFPPKPKDTLYITREPEVTCVVVDVSHEDPEVKFNW | Clone CH3C.35.23.2 with |
| | YVDGVEVHNAKTKPREEQYNSTYRVVSVLTVLHQDWLNGKEYKCK | hole, LALA, and YTE |
| | VSNKALPAPIEKTISKAKGQPREPQVYTLPPSRDELTKNQVSLSCAVK | mutations |
| | GFYPSDIAVEWESYGTEWANYKTTPPVLDSDGSFFLVSKLTVTKEEW | |
| | QQGFVFSCSVMHEALHNHYTQKSLSLSPGK | |
| 200 | APEAAGGPSVFLFPPKPKDTLYITREPEVTCVVVDVSHEDPEVKFNW | Clone CH3C.35.23.2 with |
| | YVDGVEVHNAKTKPREEQYNSTYRVVSVLTVLHQDWLNGKEYKCK | hole, LALAPG, and YTE |
| | VSNKALGAPIEKTISKAKGQPREPQVYTLPPSRDELTKNQVSLSCAVK | mutations |
| | GFYPSDIAVEWESYGTEWANYKTTPPVLDSDGSFFLVSKLTVTKEEW | |
| | QQGFVFSCSVMHEALHNHYTQKSLSLSPGK | |
| 201 | APELLGGPSVFLFPPKPKDTLMISRTPEVTCVVVDVSHEDPEVKFNW | Clone CH3C.35.23.3 with |
| | YVDGVEVHNAKTKPREEQYNSTYRVVSVLTVLHQDWLNGKEYKCK | knob mutation |
| | VSNKALPAPIEKTISKAKGQPREPQVYTLPPSRDELTKNQVSLWCLVK | |
| | GFYPSDIAVEWESYGTEWVNYKTTPPVLDSDGSFFLYSKLTVTKEEW | |
| | QQGFVFSCSVMHEALHNHYTQKSLSLSPGK | |
| 202 | APEAAGGPSVFLFPPKPKDTLMISRTPEVTCVVVDVSHEDPEVKFNW | Clone CH3C.35.23.3 with |
| | YVDGVEVHNAKTKPREEQYNSTYRVVSVLTVLHQDWLNGKEYKCK | knob and LALA mutations |
| | VSNKALPAPIEKTISKAKGQPREPQVYTLPPSRDELTKNQVSLWCLVK | |
| | GFYPSDIAVEWESYGTEWVNYKTTPPVLDSDGSFFLYSKLTVTKEEW | |
| | QQGFVFSCSVMHEALHNHYTQKSLSLSPGK | |
| 203 | APEAAGGPSVFLFPPKPKDTLMISRTPEVTCVVVDVSHEDPEVKFNW | Clone CH3C.35.23.3 with |
| | YVDGVEVHNAKTKPREEQYNSTYRVVSVLTVLHQDWLNGKEYKCK | knob and LALAPG |
| | VSNKALGAPIEKTISKAKGQPREPQVYTLPPSRDELTKNQVSLWCLV | mutations |
| | KGFYPSDIAVEWESYGTEWVNYKTTPPVLDSDGSFFLYSKLTVTKEE | |
| | WQQGFVFSCSVMHEALHNHYTQKSLSLSPGK | |
| 204 | APELLGGPSVFLFPPKPKDTLYITREPEVTCVVVDVSHEDPEVKFNWY | Clone CH3C.35.23.3 with |
| | VDGVEVHNAKTKPREEQYNSTYRVVSVLTVLHQDWLNGKEYKCKV | knob and YTE mutations |
| | SNKALPAPIEKTISKAKGQPREPQVYTLPPSRDELTKNQVSLWCLVKG | |
| | FYPSDIAVEWESYGTEWVNYKTTPPVLDSDGSFFLYSKLTVTKEEWQ | |
| | QGFVFSCSVMHEALHNHYTQKSLSLSPGK | |
| 205 | APEAAGGPSVFLFPPKPKDTLYITREPEVTCVVVDVSHEDPEVKFNW | Clone CH3C.35.23.3 with |
| | YVDGVEVHNAKTKPREEQYNSTYRVVSVLTVLHQDWLNGKEYKCK | knob, LALA, and YTE |
| | VSNKALPAPIEKTISKAKGQPREPQVYTLPPSRDELTKNQVSLWCLVK | mutations |
| | GFYPSDIAVEWESYGTEWVNYKTTPPVLDSDGSFFLYSKLTVTKEEW | |
| | QQGFVFSCSVMHEALHNHYTQKSLSLSPGK | |
| 206 | APEAAGGPSVFLFPPKPKDTLYITREPEVTCVVVDVSHEDPEVKFNW | Clone CH3C.35.23.3 with |
| | YVDGVEVHNAKTKPREEQYNSTYRVVSVLTVLHQDWLNGKEYKCK | knob, LALAPG, and YTE |
| | VSNKALGAPIEKTISKAKGQPREPQVYTLPPSRDELTKNQVSLWCLV | mutations |
| | KGFYPSDIAVEWESYGTEWVNYKTTPPVLDSDGSFFLYSKLTVTKEE | |
| | WQQGFVFSCSVMHEALHNHYTQKSLSLSPGK | |
| 207 | APELLGGPSVFLFPPKPKDTLMISRTPEVTCVVVDVSHEDPEVKFNW | Clone CH3C.35.23.3 with |
| | YVDGVEVHNAKTKPREEQYNSTYRVVSVLTVLHQDWLNGKEYKCK | hole mutations |
| | VSNKALPAPIEKTISKAKGQPREPQVYTLPPSRDELTKNQVSLSCAVK | |
| | GFYPSDIAVEWESYGTEWVNYKTTPPVLDSDGSFFLVSKLTVTKEEW | |
| | QQGFVFSCSVMHEALHNHYTQKSLSLSPGK | |
| 208 | APEAAGGPSVFLFPPKPKDTLMISRTPEVTCVVVDVSHEDPEVKFNW | Clone CH3C.35.23.3 with |
| | YVDGVEVHNAKTKPREEQYNSTYRVVSVLTVLHQDWLNGKEYKCK | hole and LALA mutations |
| | VSNKALPAPIEKTISKAKGQPREPQVYTLPPSRDELTKNQVSLSCAVK | |
| | GFYPSDIAVEWESYGTEWVNYKTTPPVLDSDGSFFLVSKLTVTKEEW | |
| | QQGFVFSCSVMHEALHNHYTQKSLSLSPGK | |
| 209 | APEAAGGPSVFLFPPKPKDTLMISRTPEVTCVVVDVSHEDPEVKFNW | Clone CH3C.35.23.3 with |
| | YVDGVEVHNAKTKPREEQYNSTYRVVSVLTVLHQDWLNGKEYKCK | hole and LALAPG |
| | VSNKALGAPIEKTISKAKGQPREPQVYTLPPSRDELTKNQVSLSCAVK | mutations |
| | GFYPSDIAVEWESYGTEWVNYKTTPPVLDSDGSFFLVSKLTVTKEEW | |
| | QQGFVFSCSVMHEALHNHYTQKSLSLSPGK | |
| 210 | APELLGGPSVFLFPPKPKDTLYITREPEVTCVVVDVSHEDPEVKFNWY | Clone CH3C.35.23.3 with |
| | VDGVEVHNAKTKPREEQYNSTYRVVSVLTVLHQDWLNGKEYKCKV | hole and YTE mutations |
| | SNKALPAPIEKTISKAKGQPREPQVYTLPPSRDELTKNQVSLSCAVKG | |
| | FYPSDIAVEWESYGTEWVNYKTTPPVLDSDGSFFLVSKLTVTKEEWQ | |
| | QGFVFSCSVMHEALHNHYTQKSLSLSPGK | |
| 211 | APEAAGGPSVFLFPPKPKDTLYITREPEVTCVVVDVSHEDPEVKFNW | Clone CH3C.35.23.3 with |
| | YVDGVEVHNAKTKPREEQYNSTYRVVSVLTVLHQDWLNGKEYKCK | hole, LALA, and YTE |
| | VSNKALPAPIEKTISKAKGQPREPQVYTLPPSRDELTKNQVSLSCAVK | mutations |
| | GFYPSDIAVEWESYGTEWVNYKTTPPVLDSDGSFFLVSKLTVTKEEW | |
| | QQGFVFSCSVMHEALHNHYTQKSLSLSPGK | |
| 212 | APEAAGGPSVFLFPPKPKDTLYITREPEVTCVVVDVSHEDPEVKFNW | Clone CH3C.35.23.3 with |
| | YVDGVEVHNAKTKPREEQYNSTYRVVSVLTVLHQDWLNGKEYKCK | hole, LALAPG, and YTE |
| | VSNKALGAPIEKTISKAKGQPREPQVYTLPPSRDELTKNQVSLSCAVK | mutations |
| | GFYPSDIAVEWESYGTEWVNYKTTPPVLDSDGSFFLVSKLTVTKEEW | |
| | QQGFVFSCSVMHEALHNHYTQKSLSLSPGK | |
| 213 | APELLGGPSVFLFPPKPKDTLMISRTPEVTCVVVDVSHEDPEVKFNW | Clone CH3C.35.23.4 with |
| | YVDGVEVHNAKTKPREEQYNSTYRVVSVLTVLHQDWLNGKEYKCK | knob mutation |
| | VSNKALPAPIEKTISKAKGQPREPQVYTLPPSRDELTKNQVSLWCLVK | |
| | GFYPSDIAVEWESYGTEWSNYKTTPPVLDSDGSFFLYSKLTVSKEEW | |
| | QQGFVFSCSVMHEALHNHYTQKSLSLSPGK | |
| 214 | APEAAGGPSVFLFPPKPKDTLMISRTPEVTCVVVDVSHEDPEVKFNW | Clone CH3C.35.23.4 with |
| | YVDGVEVHNAKTKPREEQYNSTYRVVSVLTVLHQDWLNGKEYKCK | knob and LALA mutations |
| | VSNKALPAPIEKTISKAKGQPREPQVYTLPPSRDELTKNQVSLWCLVK | |
| | GFYPSDIAVEWESYGTEWSNYKTTPPVLDSDGSFFLYSKLTVSKEEW | |
| | QQGFVFSCSVMHEALHNHYTQKSLSLSPGK | |
| 215 | APEAAGGPSVFLFPPKPKDTLMISRTPEVTCVVVDVSHEDPEVKFNW | Clone CH3C.35.23.4 with |
| | YVDGVEVHNAKTKPREEQYNSTYRVVSVLTVLHQDWLNGKEYKCK | knob and LALAPG |
| | VSNKALGAPIEKTISKAKGQPREPQVYTLPPSRDELTKNQVSLWCLV | mutations |
| | KGFYPSDIAVEWESYGTEWSNYKTTPPVLDSDGSFFLYSKLTVSKEE | |
| | WQQGFVFSCSVMHEALHNHYTQKSLSLSPGK | |
| 216 | APELLGGPSVFLFPPKPKDTLYITREPEVTCVVVDVSHEDPEVKFNWY | Clone CH3C.35.23.4 with |
| | VDGVEVHNAKTKPREEQYNSTYRVVSVLTVLHQDWLNGKEYKCKV | knob and YTE mutations |
| | SNKALPAPIEKTISKAKGQPREPQVYTLPPSRDELTKNQVSLWCLVKG | |
| | FYPSDIAVEWESYGTEWSNYKTTPPVLDSDGSFFLYSKLTVSKEEWQ | |
| | QGFVFSCSVMHEALHNHYTQKSLSLSPGK | |
| 217 | APEAAGGPSVFLFPPKPKDTLYITREPEVTCVVVDVSHEDPEVKFNW | Clone CH3C.35.23.4 with |
| | YVDGVEVHNAKTKPREEQYNSTYRVVSVLTVLHQDWLNGKEYKCK | knob, LALA, and YTE |
| | VSNKALPAPIEKTISKAKGQPREPQVYTLPPSRDELTKNQVSLWCLVK | mutations |
| | GFYPSDIAVEWESYGTEWSNYKTTPPVLDSDGSFFLYSKLTVSKEEW | |
| | QQGFVFSCSVMHEALHNHYTQKSLSLSPGK | |
| 218 | APEAAGGPSVFLFPPKPKDTLYITREPEVTCVVVDVSHEDPEVKFNW | Clone CH3C.35.23.4 with |
| | YVDGVEVHNAKTKPREEQYNSTYRVVSVLTVLHQDWLNGKEYKCK | knob, LALAPG, and YTE |
| | VSNKALGAPIEKTISKAKGQPREPQVYTLPPSRDELTKNQVSLWCLV | mutations |
| | KGFYPSDIAVEWESYGTEWSNYKTTPPVLDSDGSFFLYSKLTVSKEE | |
| | WQQGFVFSCSVMHEALHNHYTQKSLSLSPGK | |
| 219 | APELLGGPSVFLFPPKPKDTLMISRTPEVTCVVVDVSHEDPEVKFNW | Clone CH3C.35.23.4 with |
| | YVDGVEVHNAKTKPREEQYNSTYRVVSVLTVLHQDWLNGKEYKCK | hole mutations |
| | VSNKALPAPIEKTISKAKGQPREPQVYTLPPSRDELTKNQVSLSCAVK | |
| | GFYPSDIAVEWESYGTEWSNYKTTPPVLDSDGSFFLVSKLTVSKEEW | |
| | QQGFVFSCSVMHEALHNHYTQKSLSLSPGK | |
| 220 | APEAAGGPSVFLFPPKPKDTLMISRTPEVTCVVVDVSHEDPEVKFNW | Clone CH3C.35.23.4 with |
| | YVDGVEVHNAKTKPREEQYNSTYRVVSVLTVLHQDWLNGKEYKCK | hole and LALA mutations |
| | VSNKALPAPIEKTISKAKGQPREPQVYTLPPSRDELTKNQVSLSCAVK | |
| | GFYPSDIAVEWESYGTEWSNYKTTPPVLDSDGSFFLVSKLTVSKEEW | |
| | QQGFVFSCSVMHEALHNHYTQKSLSLSPGK | |
| 221 | APEAAGGPSVFLFPPKPKDTLMISRTPEVTCVVVDVSHEDPEVKFNW | Clone CH3C.35.23.4 with |
| | YVDGVEVHNAKTKPREEQYNSTYRVVSVLTVLHQDWLNGKEYKCK | hole and LALAPG |
| | VSNKALGAPIEKTISKAKGQPREPQVYTLPPSRDELTKNQVSLSCAVK | mutations |
| | GFYPSDIAVEWESYGTEWSNYKTTPPVLDSDGSFFLVSKLTVSKEEW | |
| | QQGFVFSCSVMHEALHNHYTQKSLSLSPGK | |
| 222 | APELLGGPSVFLFPPKPKDTLYITREPEVTCVVVDVSHEDPEVKFNWY | Clone CH3C.35.23.4 with |
| | VDGVEVHNAKTKPREEQYNSTYRVVSVLTVLHQDWLNGKEYKCKV | hole and YTE mutations |
| | SNKALPAPIEKTISKAKGQPREPQVYTLPPSRDELTKNQVSLSCAVKG | |
| | FYPSDIAVEWESYGTEWSNYKTTPPVLDSDGSFFLVSKLTVSKEEWQ | |
| | QGFVFSCSVMHEALHNHYTQKSLSLSPGK | |
| 223 | APEAAGGPSVFLFPPKPKDTLYITREPEVTCVVVDVSHEDPEVKFNW | Clone CH3C.35.23.4 with |
| | YVDGVEVHNAKTKPREEQYNSTYRVVSVLTVLHQDWLNGKEYKCK | hole, LALA, and YTE |
| | VSNKALPAPIEKTISKAKGQPREPQVYTLPPSRDELTKNQVSLSCAVK | mutations |
| | GFYPSDIAVEWESYGTEWSNYKTTPPVLDSDGSFFLVSKLTVSKEEW | |
| | QQGFVFSCSVMHEALHNHYTQKSLSLSPGK | |
| 224 | APEAAGGPSVFLFPPKPKDTLYITREPEVTCVVVDVSHEDPEVKFNW | Clone CH3C.35.23.4 with |
| | YVDGVEVHNAKTKPREEQYNSTYRVVSVLTVLHQDWLNGKEYKCK | hole, LALAPG, and YTE |
| | VSNKALGAPIEKTISKAKGQPREPQVYTLPPSRDELTKNQVSLSCAVK | mutations |
| | GFYPSDIAVEWESYGTEWSNYKTTPPVLDSDGSFFLVSKLTVSKEEW | |
| | QQGFVFSCSVMHEALHNHYTQKSLSLSPGK | |
| 225 | APELLGGPSVFLFPPKPKDTLMISRTPEVTCVVVDVSHEDPEVKFNW | Clone CH3C.35.21.17.2 |
| | YVDGVEVHNAKTKPREEQYNSTYRVVSVLTVLHQDWLNGKEYKCK | with knob mutation |
| | VSNKALPAPIEKTISKAKGQPREPQVYTLPPSRDELTKNQVSLWCLVK | |
| | GFYPSDIAVLWESYGTEWASYKTTPPVLDSDGSFFLYSKLTVTKEEW | |
| | QQGFVFSCSVMHEALHNHYTQKSLSLSPGK | |
| 226 | APEAAGGPSVFLFPPKPKDTLMISRTPEVTCVVVDVSHEDPEVKFNW | Clone CH3C.35.21.17.2 |
| | YVDGVEVHNAKTKPREEQYNSTYRVVSVLTVLHQDWLNGKEYKCK | with knob and LALA |
| | VSNKALPAPIEKTISKAKGQPREPQVYTLPPSRDELTKNQVSLWCLVK | mutations |
| | GFYPSDIAVLWESYGTEWASYKTTPPVLDSDGSFFLYSKLTVTKEEW | |
| | QQGFVFSCSVMHEALHNHYTQKSLSLSPGK | |
| 227 | APEAAGGPSVFLFPPKPKDTLMISRTPEVTCVVVDVSHEDPEVKFNW | Clone CH3C.35.21.17.2 |
| | YVDGVEVHNAKTKPREEQYNSTYRVVSVLTVLHQDWLNGKEYKCK | with knob and LALAPG |
| | VSNKALGAPIEKTISKAKGQPREPQVYTLPPSRDELTKNQVSLWCLV | mutations |
| | KGFYPSDIAVLWESYGTEWASYKTTPPVLDSDGSFFLYSKLTVTKEE | |
| | WQQGFVFSCSVMHEALHNHYTQKSLSLSPGK | |
| 228 | APELLGGPSVFLFPPKPKDTLYITREPEVTCVVVDVSHEDPEVKFNWY | Clone CH3C.35.21.17.2 |
| | VDGVEVHNAKTKPREEQYNSTYRVVSVLTVLHQDWLNGKEYKCKV | with knob and YTE |
| | SNKALPAPIEKTISKAKGQPREPQVYTLPPSRDELTKNQVSLWCLVKG | mutations |
| | FYPSDIAVLWESYGTEWASYKTTPPVLDSDGSFFLYSKLTVTKEEWQ | |
| | QGFVFSCSVMHEALHNHYTQKSLSLSPGK | |
| 229 | APEAAGGPSVFLFPPKPKDTLYITREPEVTCVVVDVSHEDPEVKFNW | Clone CH3C.35.21.17.2 |
| | YVDGVEVHNAKTKPREEQYNSTYRVVSVLTVLHQDWLNGKEYKCK | with knob, LALA, and |
| | VSNKALPAPIEKTISKAKGQPREPQVYTLPPSRDELTKNQVSLWCLVK | YTE mutations |
| | GFYPSDIAVLWESYGTEWASYKTTPPVLDSDGSFFLYSKLTVTKEEW | |
| | QQGFVFSCSVMHEALHNHYTQKSLSLSPGK | |
| 230 | APEAAGGPSVFLFPPKPKDTLYITREPEVTCVVVDVSHEDPEVKFNW | Clone CH3C.35.21.17.2 |
| | YVDGVEVHNAKTKPREEQYNSTYRVVSVLTVLHQDWLNGKEYKCK | with knob, LALAPG, and |
| | VSNKALGAPIEKTISKAKGQPREPQVYTLPPSRDELTKNQVSLWCLV | YTE mutations |
| | KGFYPSDIAVLWESYGTEWASYKTTPPVLDSDGSFFLYSKLTVTKEE | |
| | WQQGFVFSCSVMHEALHNHYTQKSLSLSPGK | |
| 231 | APELLGGPSVFLFPPKPKDTLMISRTPEVTCVVVDVSHEDPEVKFNW | Clone CH3C.3521.17.2 |
| | YVDGVEVHNAKTKPREEQYNSTYRVVSVLTVLHQDWLNGKEYKCK | with hole mutations |
| | VSNKALPAPIEKTISKAKGQPREPQVYTLPPSRDELTKNQVSLSCAVK | |
| | GFYPSDIAVLWESYGTEWASYKTTPPVLDSDGSFFLVSKLTVTKEEW | |
| | QQGFVFSCSVMHEALHNHYTQKSLSLSPGK | |
| 232 | APEAAGGPSVFLFPPKPKDTLMISRTPEVTCVVVDVSHEDPEVKFNW | Clone CH3C.35.21.17.2 |
| | YVDGVEVHNAKTKPREEQYNSTYRVVSVLTVLHQDWLNGKEYKCK | with hole and LALA |
| | VSNKALPAPIEKTISKAKGQPREPQVYTLPPSRDELTKNQVSLSCAVK | mutations |
| | GFYPSDIAVLWESYGTEWASYKTTPPVLDSDGSFFLVSKLTVTKEEW | |
| | QQGFVFSCSVMHEALHNHYTQKSLSLSPGK | |
| 233 | APEAAGGPSVFLFPPKPKDTLMISRTPEVTCVVVDVSHEDPEVKFNW | Clone CH3C.35.21.17.2 |
| | YVDGVEVHNAKTKPREEQYNSTYRVVSVLTVLHQDWLNGKEYKCK | with hole and LALAPG |
| | VSNKALGAPIEKTISKAKGQPREPQVYTLPPSRDELTKNQVSLSCAVK | mutations |
| | GFYPSDIAVLWESYGTEWASYKTTPPVLDSDGSFFLVSKLTVTKEEW | |
| | QQGFVFSCSVMHEALHNHYTQKSLSLSPGK | |
| 234 | APELLGGPSVFLFPPKPKDTLYITREPEVTCVVVDVSHEDPEVKFNWY | Clone CH3C.35.21.17.2 |
| | VDGVEVHNAKTKPREEQYNSTYRVVSVLTVLHQDWLNGKEYKCKV | with hole and YTE |
| | SNKALPAPIEKTISKAKGQPREPQVYTLPPSRDELTKNQVSLSCAVKG | mutations |
| | FYPSDIAVLWESYGTEWASYKTTPPVLDSDGSFFLVSKLTVTKEEWQ | |
| | QGFVFSCSVMHEALHNHYTQKSLSLSPGK | |
| 235 | APEAAGGPSVFLFPPKPKDTLYITREPEVTCVVVDVSHEDPEVKFNW | Clone CH3C.35.21.17.2 |
| | YVDGVEVHNAKTKPREEQYNSTYRVVSVLTVLHQDWLNGKEYKCK | with hole, LALA, and |
| | VSNKALPAPIEKTISKAKGQPREPQVYTLPPSRDELTKNQVSLSCAVK | YTE mutations |
| | GFYPSDIAVLWESYGTEWASYKTTPPVLDSDGSFFLVSKLTVTKEEW | |
| | QQGFVFSCSVMHEALHNHYTQKSLSLSPGK | |
| 236 | APEAAGGPSVFLFPPKPKDTLYITREPEVTCVVVDVSHEDPEVKFNW | Clone CH3C.35.21.17.2 |
| | YVDGVEVHNAKTKPREEQYNSTYRVVSVLTVLHQDWLNGKEYKCK | with hole, LALAPG, and |
| | VSNKALGAPIEKTISKAKGQPREPQVYTLPPSRDELTKNQVSLSCAVK | YTE mutations |
| | GFYPSDIAVLWESYGTEWASYKTTPPVLDSDGSFFLVSKLTVTKEEW | |
| | QQGFVFSCSVMHEALHNHYTQKSLSLSPGK | |
| 237 | APELLGGPSVFLFPPKPKDTLMISRTPEVTCVVVDVSHEDPEVKFNW | Clone CH3C.35.23 with |
| | YVDGVEVHNAKTKPREEQYNSTYRVVSVLTVLHQDWLNGKEYKCK | knob mutation |
| | VSNKALPAPIEKTISKAKGQPREPQVYTLPPSRDELTKNQVSLWCLVK | |
| | GFYPSDIAVEWESYGTEWSNYKTTPPVLDSDGSFFLYSKLTVTKEEW | |
| | QQGFVFSCSVMHEALHNHYTQKSLSLSPGK | |
| 238 | APEAAGGPSVFLFPPKPKDTLMISRTPEVTCVVVDVSHEDPEVKFNW | Clone CH3C.35.23 with |
| | YVDGVEVHNAKTKPREEQYNSTYRVVSVLTVLHQDWLNGKEYKCK | knob and LALA mutations |
| | VSNKALPAPIEKTISKAKGQPREPQVYTLPPSRDELTKNQVSLWCLVK | |
| | GFYPSDIAVEWESYGTEWSNYKTTPPVLDSDGSFFLYSKLTVTKEEW | |
| | QQGFVFSCSVMHEALHNHYTQKSLSLSPGK | |
| 239 | APEAAGGPSVFLFPPKPKDTLMISRTPEVTCVVVDVSHEDPEVKFNW | Clone CH3C.35.23 with |
| | YVDGVEVHNAKTKPREEQYNSTYRVVSVLTVLHQDWLNGKEYKCK | knob and LALAPG |
| | VSNKALGAPIEKTISKAKGQPREPQVYTLPPSRDELTKNQVSLWCLV | mutations |
| | KGFYPSDIAVEWESYGTEWSNYKTTPPVLDSDGSFFLYSKLTVTKEE | |
| | WQQGFVFSCSVMHEALHNHYTQKSLSLSPGK | |
| 240 | APELLGGPSVFLFPPKPKDTLYITREPEVTCVVVDVSHEDPEVKFNWY | Clone CH3C.35.23 with |
| | VDGVEVHNAKTKPREEQYNSTYRVVSVLTVLHQDWLNGKEYKCKV | knob and YTE mutations |
| | SNKALPAPIEKTISKAKGQPREPQVYTLPPSRDELTKNQVSLWCLVKG | |
| | FYPSDIAVEWESYGTEWSNYKTTPPVLDSDGSFFLYSKLTVTKEEWQ | |
| | QGFVFSCSVMHEALHNHYTQKSLSLSPGK | |
| 241 | APEAAGGPSVFLFPPKPKDTLYITREPEVTCVVVDVSHEDPEVKFNW | Clone CH3C.35.23 with |
| | YVDGVEVHNAKTKPREEQYNSTYRVVSVLTVLHQDWLNGKEYKCK | knob, LALA, and YTE |
| | VSNKALPAPIEKTISKAKGQPREPQVYTLPPSRDELTKNQVSLWCLVK | mutations |
| | GFYPSDIAVEWESYGTEWSNYKTTPPVLDSDGSFFLYSKLTVTKEEW | |
| | QQGFVFSCSVMHEALHNHYTQKSLSLSPGK | |
| 242 | APEAAGGPSVFLFPPKPKDTLYITREPEVTCVVVDVSHEDPEVKFNW | Clone CH3C.35.23 with |
| | YVDGVEVHNAKTKPREEQYNSTYRVVSVLTVLHQDWLNGKEYKCK | knob, LALAPG, and YTE |
| | VSNKALGAPIEKTISKAKGQPREPQVYTLPPSRDELTKNQVSLWCLV | mutations |
| | KGFYPSDIAVEWESYGTEWSNYKTTPPVLDSDGSFFLYSKLTVTKEE | |
| | WQQGFVFSCSVMHEALHNHYTQKSLSLSPGK | |
| 243 | APELLGGPSVFLFPPKPKDTLMISRTPEVTCVVVDVSHEDPEVKFNW | Clone CH3C.35.23 with |
| | YVDGVEVHNAKTKPREEQYNSTYRVVSVLTVLHQDWLNGKEYKCK | hole mutations |
| | VSNKALPAPIEKTISKAKGQPREPQVYTLPPSRDELTKNQVSLSCAVK | |
| | GFYPSDIAVEWESYGTEWSNYKTTPPVLDSDGSFFLVSKLTVTKEEW | |
| | QQGFVFSCSVMHEALHNHYTQKSLSLSPGK | |
| 244 | APEAAGGPSVFLFPPKPKDTLMISRTPEVTCVVVDVSHEDPEVKFNW | Clone CH3C.35.23 with |
| | YVDGVEVHNAKTKPREEQYNSTYRVVSVLTVLHQDWLNGKEYKCK | hole and LALA mutations |
| | VSNKALPAPIEKTISKAKGQPREPQVYTLPPSRDELTKNQVSLSCAVK | |
| | GFYPSDIAVEWESYGTEWSNYKTTPPVLDSDGSFFLVSKLTVTKEEW | |
| | QQGFVFSCSVMHEALHNHYTQKSLSLSPGK | |
| 245 | APEAAGGPSVFLFPPKPKDTLMISRTPEVTCVVVDVSHEDPEVKFNW | Clone CH3C.35.23 with |
| | YVDGVEVHNAKTKPREEQYNSTYRVVSVLTVLHQDWLNGKEYKCK | hole and LALAPG |
| | VSNKALGAPIEKTISKAKGQPREPQVYTLPPSRDELTKNQVSLSCAVK | mutations |
| | GFYPSDIAVEWESYGTEWSNYKTTPPVLDSDGSFFLVSKLTVTKEEW | |
| | QQGFVFSCSVMHEALHNHYTQKSLSLSPGK | |
| 246 | APELLGGPSVFLFPPKPKDTLYITREPEVTCVVVDVSHEDPEVKFNWY | Clone CH3C.35.23 with |
| | VDGVEVHNAKTKPREEQYNSTYRVVSVLTVLHQDWLNGKEYKCKV | hole and YTE mutations |
| | SNKALPAPIEKTISKAKGQPREPQVYTLPPSRDELTKNQVSLSCAVKG | |
| | FYPSDIAVEWESYGTEWSNYKTTPPVLDSDGSFFLVSKLTVTKEEWQ | |
| | QGFVFSCSVMHEALHNHYTQKSLSLSPGK | |
| 247 | APEAAGGPSVFLFPPKPKDTLYITREPEVTCVVVDVSHEDPEVKFNW | Clone CH3C.35.23 with |
| | YVDGVEVHNAKTKPREEQYNSTYRVVSVLTVLHQDWLNGKEYKCK | hole, LALA, and YTE |
| | VSNKALPAPIEKTISKAKGQPREPQVYTLPPSRDELTKNQVSLSCAVK | mutations |
| | GFYPSDIAVEWESYGTEWSNYKTTPPVLDSDGSFFLVSKLTVTKEEW | |
| | QQGFVFSCSVMHEALHNHYTQKSLSLSPGK | |
| 248 | APEAAGGPSVFLFPPKPKDTLYITREPEVTCVVVDVSHEDPEVKFNW | Clone CH3C.35.23 with |
| | YVDGVEVHNAKTKPREEQYNSTYRVVSVLTVLHQDWLNGKEYKCK | hole, LALAPG, and YTE |
| | VSNKALGAPIEKTISKAKGQPREPQVYTLPPSRDELTKNQVSLSCAVK | mutations |
| | GFYPSDIAVEWESYGTEWSNYKTTPPVLDSDGSFFLVSKLTVTKEEW | |
| | QQGFVFSCSVMHEALHNHYTQKSLSLSPGK | |
| 249 | METDTLLLWVLLLWVPGSTGDKTHTCPPCPAPEAAGGPSVFLFPPKP | Expressed CH3C.35 Fc |
| | KDTLYITREPEVTCVVVDVSHEDPEVKFNWYVDGVEVHNAKTKPRE | sequence |
| | EQYNSTYRVVSVLTVLHQDWLNGKEYKCKVSNKALGAPIEKTISKA | |
| | KGQPREPQVYTLPPSRDELTKNQVSLTCLVKGFYPSDIAVEWESYGT | |
| | EWSSYKTTPPVLDSDGSFFLYSKLTVTKSEWQQGFVFSCSVMHEALH | |
| | NHYTQKSLSLSPGK | |
| 250 | APELLGGPSVFLFPPKPKDTLMISRTPEVTCVVVDVSHEDPEVKFNW | Clone CH3C.35.21 with |
| | YVDGVEVHNAKTKPREEQYNSTYRVVSVLTVLHQDWLNGKEYKCK | knob |
| | VSNKALPAPIEKTISKAKGQPREPQVYTLPPSRDELTKNQVSLWCLVK | |
| | GFYPSDIAVWWESYGTEWSSYKTTPPVLDSDGSFFLYSKLTVTKEEW | |
| | QQGFVFSCSVMHEALHNHYTQKSLSLSPGK | |
| 251 | APELLGGPSVFLFPPKPKDTLMISRTPEVTCVVVDVSHEDPEVKFNW | Human Fc sequence with |
| | YVDGVEVHNAKTKPREEQYNSTYRVVSVLTVLHQDWLNGKEYKCK | hole mutations |
| | VSNKALPAPIEKTISKAKGQPREPQVYTLPPSRDELTKNQVSLSCAVK | |
| | GFYPSDIAVEWESNGQPENNYKTTPPVLDSDGSFFLVSKLTVDKSRW | |
| | QQGNVFSCSVMHEALHNHYTQKSLSLSPGK | |
| 252 | APEAAGGPSVFLFPPKPKDTLMISRTPEVTCVVVDVSHEDPEVKFNW | Clone CH3C.35.21 with |
| | YVDGVEVHNAKTKPREEQYNSTYRVVSVLTVLHQDWLNGKEYKCK | knob and LALA mutations |
| | VSNKALPAPIEKTISKAKGQPREPQVYTLPPSRDELTKNQVSLWCLVK | |
| | GFYPSDIAVWWESYGTEWSSYKTTPPVLDSDGSFFLYSKLTVTKEEW | |
| | QQGFVFSCSVMHEALHNHYTQKSLSLSPGK | |
| 253 | APEAAGGPSVFLFPPKPKDTLMISRTPEVTCVVVDVSHEDPEVKFNW | Human Fc sequence with |
| | YVDGVEVHNAKTKPREEQYNSTYRVVSVLTVLHQDWLNGKEYKCK | hole mutations and LALA |
| | VSNKALPAPIEKTISKAKGQPREPQVYTLPPSRDELTKNQVSLSCAVK | mutations |
| | GFYPSDIAVEWESNGQPENNYKTTPPVLDSDGSFFLVSKLTVDKSRW | |
| | QQGNVFSCSVMHEALHNHYTQKSLSLSPGK | |
| 254 | QVQLQQPGAELVKPGASVKMSCKASGYTFTSYNMHWVKQTPGRGL | Heavy chain for anti- |
| | EWIGAIYPGNGDTSYNQKFKGKATLTADKSSSTAYMQLSSLTSEDSA | hCD20-3C.35.21 with |
| | VYYCARSTYYGGDWYFNVWGAGTTVTVSAASTKGPSVFPLAPSSKS | knob mutations |
| | TSGGTAALGCLVKDYFPEPVTVSWNSGALTSGVHTFPAVLQSSGLYS | |
| | LSSVVTVPSSSLGTQTYICNVNHKPSNTKVDKKVEPKSCDKTHTCPPC | |
| | PAPELLGGPSVFLFPPKPKDTLMISRTPEVTCVVVDVSHEDPEVKFNW | |
| | YVDGVEVHNAKTKPREEQYNSTYRVVSVLTVLHQDWLNGKEYKCK | |
| | VSNKALPAPIEKTISKAKGQPREPQVYTLPPSRDELTKNQVSLWCLVK | |
| | GFYPSDIAVWWESYGTEWSSYKTTPPVLDSDGSFFLYSKLTVTKEEW | |
| | QQGFVFSCSVMHEALHNHYTQKSLSLSPGK | |
| 255 | QVQLQQPGAELVKPGASVKMSCKASGYTFTSYNMHWVKQTPGRGL | Heavy chain for anti- |
| | EWIGAIYPGNGDTSYNQKFKGKATLTADKSSSTAYMQLSSLTSEDSA | hCD20-3C.35.21 with |
| | VYYCARSTYYGGDWYFNVWGAGTTVTVSAASTKGPSVFPLAPSSKS | knob and LALA mutations |
| | TSGGTAALGCLVKDYFPEPVTVSWNSGALTSGVHTFPAVLQSSGLYS | |
| | LSSVVTVPSSSLGTQTYICNVNHKPSNTKVDKKVEPKSCDKTHTCPPC | |
| | PAPEAAGGPSVFLFPPKPKDTLMISRTPEVTCVVVDVSHEDPEVKFN | |
| | WYVDGVEVHNAKTKPREEQYNSTYRVVSVLTVLHQDWLNGKEYK | |
| | CKVSNKALPAPIEKTISKAKGQPREPQVYTLPPSRDELTKNQVSLWCL | |
| | VKGFYPSDIAVWWESYGTEWSSYKTTPPVLDSDGSFFLYSKLTVTKE | |
| | EWQQGFVFSCSVMHEALHNHYTQKSLSLSPGK | |
| 256 | QVQLQQPGAELVKPGASVKMSCKASGYTFTSYNMHWVKQTPGRGL | Heavy chain for anti- |
| | EWIGAIYPGNGDTSYNQKFKGKATLTADKSSSTAYMQLSSLTSEDSA | hCD20-Fc with hole |
| | VYYCARSTYYGGDWYFNVWGAGTTVTVSAASTKGPSVFPLAPSSKS | mutations |
| | TSGGTAALGCLVKDYFPEPVTVSWNSGALTSGVHTFPAVLQSSGLYS | |
| | LSSVVTVPSSSLGTQTYICNVNHKPSNTKVDKKVEPKSCDKTHTCPPC | |
| | PAPELLGGPSVFLFPPKPKDTLMISRTPEVTCVVVDVSHEDPEVKFNW | |
| | YVDGVEVHNAKTKPREEQYNSTYRVVSVLTVLHQDWLNGKEYKCK | |
| | VSNKALPAPIEKTISKAKGQPREPQVYTLPPSRDELTKNQVSLSCAVK | |
| | GFYPSDIAVEWESNGQPENNYKTTPPVLDSDGSFFLVSKLTVDKSRW | |
| | QQGNVFSCSVMHEALHNHYTQKSLSLSPGK | |
| 257 | QVQLQQPGAELVKPGASVKMSCKASGYTFTSYNMHWVKQTPGRGL | Heavy chain for anti- |
| | EWIGAIYPGNGDTSYNQKFKGKATLTADKSSSTAYMQLSSLTSEDSA | hCD20-Fc with hole and |
| | VYYCARSTYYGGDWYFNVWGAGTTVTVSAASTKGPSVFPLAPSSKS | LALA mutations |
| | TSGGTAALGCLVKDYFPEPVTVSWNSGALTSGVHTFPAVLQSSGLYS | |
| | LSSVVTVPSSSLGTQTYICNVNHKPSNTKVDKKVEPKSCDKTHTCPPC | |
| | PAPEAAGGPSVFLFPPKPKDTLMISRTPEVTCVVVDVSHEDPEVKFN | |
| | WYVDGVEVHNAKTKPREEQYNSTYRVVSVLTVLHQDWLNGKEYK | |
| | CKVSNKALPAPIEKTISKAKGQPREPQVYTLPPSRDELTKNQVSLSCA | |
| | VKGFYPSDIAVEWESNGQPENNYKTTPPVLDSDGSFFLVSKLTVDKS | |
| | RWQQGNVFSCSVMHEALHNHYTQKSLSLSPGK | |
| 258 | QIVLSQSPAILSASPGEKVTMTCRASSSVSYIHWFQQKPGSSPKPWIY | Light chain for anti- |
| | ATSNLASGVPVRFSGSGSGTSYSLTISRVEAEDAATYYCQQWTSNPPT | hCD20 fusion |
| | FGGGTKLEIKRTVAAPSVFIFPPSDEQLKSGTASVVCLLNNFYPREAK | |
| | VQWKVDNALQSGNSQESVTEQDSKDSTYSLSSTLTLSKADYEKHKV | |
| | YACEVTHQGLSSPVTKSFNRGEC | |
| 259 | QVQLQQPGAELVRPGTSVKLSCKASGYTFTSYWMHWIKQRPGQGLE | Heavy chain for anti- |
| | WIGVIDPSDNYTKYNQKFKGKATLTVDTSSSTAYMQLSSLTSEDSAV | mCD20-3C.35.21 with |
| | YFCAREGYYGSSPWFAYWGQGTLVTVSSASTKGPSVFPLAPSSKSTS | knob mutations |
| | GGTAALGCLVKDYFPEPVTVSWNSGALTSGVHTFPAVLQSSGLYSLS | |
| | SVVTVPSSSLGTQTYICNVNHKPSNTKVDKKVEPKSCDKTHTCPPCP | |
| | APELLGGPSVFLFPPKPKDTLMISRTPEVTCVVVDVSHEDPEVKFNW | |
| | YVDGVEVHNAKTKPREEQYNSTYRVVSVLTVLHQDWLNGKEYKCK | |
| | VSNKALPAPIEKTISKAKGQPREPQVYTLPPSRDELTKNQVSLWCLVK | |
| | GFYPSDIAVWWESYGTEWSSYKTTPPVLDSDGSFFLYSKLTVTKEEW | |
| | QQGFVFSCSVMHEALHNHYTQKSLSLSPGK | |
| 260 | QVQLQQPGAELVRPGTSVKLSCKASGYTFTSYWMHWIKQRPGQGLE | Heavy chain for anti- |
| | WIGVIDPSDNYTKYNQKFKGKATLTVDTSSSTAYMQLSSLTSEDSAV | mCD20-3C.35.21 with |
| | YFCAREGYYGSSPWFAYWGQGTLVTVSSASTKGPSVFPLAPSSKSTS | knob and LALA mutations |
| | GGTAALGCLVKDYFPEPVTVSWNSGALTSGVHTFPAVLQSSGLYSLS | |
| | SVVTVPSSSLGTQTYICNVNHKPSNTKVDKKVEPKSCDKTHTCPPCP | |
| | APEAAGGPSVFLFPPKPKDTLMISRTPEVTCVVVDVSHEDPEVKFNW | |
| | YVDGVEVHNAKTKPREEQYNSTYRVVSVLTVLHQDWLNGKEYKCK | |
| | VSNKALPAPIEKTISKAKGQPREPQVYTLPPSRDELTKNQVSLWCLVK | |
| | GFYPSDIAVWWESYGTEWSSYKTTPPVLDSDGSFFLYSKLTVTKEEW | |
| | QQGFVFSCSVMHEALHNHYTQKSLSLSPGK | |
| 261 | QVQLQQPGAELVRPGTSVKLSCKASGYTFTSYWMHWIKQRPGQGLE | Heavy chain for anti- |
| | WIGVIDPSDNYTKYNQKFKGKATLTVDTSSSTAYMQLSSLTSEDSAV | mCD20-Fc hole |
| | YFCAREGYYGSSPWFAYWGQGTLVTVSSASTKGPSVFPLAPSSKSTS | mutations |
| | GGTAALGCLVKDYFPEPVTVSWNSGALTSGVHTFPAVLQSSGLYSLS | |
| | SVVTVPSSSLGTQTYICNVNHKPSNTKVDKKVEPKSCDKTHTCPPCP | |
| | APELLGGPSVFLFPPKPKDTLMISRTPEVTCVVVDVSHEDPEVKFNW | |
| | YVDGVEVHNAKTKPREEQYNSTYRVVSVLTVLHQDWLNGKEYKCK | |
| | VSNKALPAPIEKTISKAKGQPREPQVYTLPPSRDELTKNQVSLSCAVK | |
| | GFYPSDIAVEWESNGQPENNYKTTPPVLDSDGSFFLVSKLTVDKSRW | |
| | QQGNVFSCSVMHEALHNHYTQKSLSLSPGK | |
| 262 | QVQLQQPGAELVRPGTSVKLSCKASGYTFTSYWMHWIKQRPGQGLE | Heavy chain for anti- |
| | WIGVIDPSDNYTKYNQKFKGKATLTVDTSSSTAYMQLSSLTSEDSAV | mCD20-Fc with hole and |
| | YFCAREGYYGSSPWFAYWGQGTLVTVSSASTKGPSVFPLAPSSKSTS | LALA mutations |
| | GGTAALGCLVKDYFPEPVTVSWNSGALTSGVHTFPAVLQSSGLYSLS | |
| | SVVTVPSSSLGTQTYICNVNHKPSNTKVDKKVEPKSCDKTHTCPPCP | |
| | APEAAGGPSVFLFPPKPKDTLMISRTPEVTCVVVDVSHEDPEVKFNW | |
| | YVDGVEVHNAKTKPREEQYNSTYRVVSVLTVLHQDWLNGKEYKCK | |
| | VSNKALPAPIEKTISKAKGQPREPQVYTLPPSRDELTKNQVSLSCAVK | |
| | GFYPSDIAVEWESNGQPENNYKTTPPVLDSDGSFFLVSKLTVDKSRW | |
| | QQGNVFSCSVMHEALHNHYTQKSLSLSPGK | |
| 263 | QIVMSQSPAILSASPGEKVTMTCRARSSVSYIHWYQQKPGSSPKPWIY | Light chain for anti- |
| | ATSNLASGVPGRFSGSGSGTSYSLTITRVEAEDAATYYCQQWSSKPPT | mCD20 fusion |
| | FGGGTKLEIKRTVAAPSVFIFPPSDEQLKSGTASVVCLLNNFYPREAK | |
| | VQWKVDNALQSGNSQESVTEQDSKDSTYSLSSTLTLSKADYEKHKV | |
| | YACEVTHQGLSSPVTKSFNRGEC | |
| 264 | GAATACATACACTCCTCGTGAGG | sgRNA-1 |
| 265 | AGAAGAATACTTAACATCTTTGG | sgRNA-2 |
| 266 | GCTCAGAACTCCGTGATCATCGTGGATAAGAACGGCCGGCTGGTG | DNA sequence of human |
| | TACCTGGTGGAGAACCCTGGCGGATACGTGGCTTACTCTAAGGCC | apical domain insert |
| | GCTACCGTGACAGGCAAGCTGGTGCACGCCAACTTCGGAACCAAG | |
| | AAGGACTTTGAGGATCTGTACACACCAGTGAACGGCTCTATCGTG | |
| | ATCGTGCGCGCTGGAAAGATCACCTTCGCCGAGAAGGTGGCTAAC | |
| | GCCGAGAGCCTGAACGCCATCGGCGTGCTGATCTACATGGATCAG | |
| | ACAAAGTTTCCCATCGTGAACGCTGAGCTGTCTTTCTTTGGACACG | |
| | CTCACCTGGGCACCGGAGACCCATACACACCCGGATTCCCTAGCT | |
| | TTAACCACACCCAGTTCCCCCCTTCCAGGTCTAGCGGACTGCCAA | |
| | ACATCCCCGTGCAGACAATCAGCAGAGCCGCTGCCGAGAAGCTGT | |
| | TTGGCAACATGGAGGGAGACTGCCCCTCCGATTGGAAGACCGACT | |
| | CTACATGTAGGATGGTGACCTCCGAGTCAAAAAATGTCAAACTCA | |
| | CCGTGTCCAAT | |
| 267 | CTATACAGATATATAAGGATGGGGCTTTTTTTTTTTAATTTTTAAA | Sequence of full donor |
| | AAAGATTTGTTTATTATTATATGTAAGTACACTGTAGCTGTCTTCA | DNA (left homology arm: |
| | GACACTCCAGAAGAGGGCATCAGATCTCATTACAGATGGTTGTGA | 1-817; right homology |
| | GCTACCATGTGGTCACTGGGATTTGAACTCAGGACCTTCAGAAGA | arm: 1523-2329; human |
| | GCAGTCAGTGCTCTTAACTGATAAGTTAATAATAAGTTAACTGAT | apical domain: 941-1492; |
| | AAGGTAATAAAGGTCCCCTATGAAAAGGGTTCAGACCCAAAGAG | codon optimized sequence: |
| | TCAGAGATCCACAGGTTGAGAACCTCCTGCCCTAAATCTTGTTGCT | 821-1522) |
| | CTCCTTATTCAAGACCACTCCTGTTGCAGTTGCTCTTAAGCATGAG | |
| | TATGCTCCCTTCTGAAAGTCTCCATAGCAGCCATCTCTCCAGCCCC | |
| | AGAGTGAGGCTTTTAAAGGAATCTTCATGATAAATAGAATTTTTA | |
| | AAAAAGTAACTGAAGTTACTTAAGGTGTTAAGGTACATTTTATTC | |
| | CCTCAGTAACTGGTTAATCTAGCAGTTTTGAGTCATACTTCATTTA | |
| | TCTTGACTTTGAAGAGTAAGATATTAAAACAATTTGCTTGATCCTT | |
| | GAAGTAAGTATTTAAATAGACATTTTAATGCAGACTTTTTTTAGTT | |
| | GACTGGTGGTGTTGCACGTGGTCAATCCAAGTACTCATGGGAGGC | |
| | AGAGGCAGGAGGATCTCTCTCTAGACCAGCCTGGTCTATAGAGCA | |
| | AGTTCCAGGACAGCCAGGGCTACACAGAAACCTTGTTTCAAACAA | |
| | GACTTTTATCCTTCCAGGCAGCTGAGCCAGAATACATACACTCCT | |
| | AGGGAAGCTGGTTCACAGAAGGACGAATCCCTGGCATACTACATC | |
| | GAGAATCAGTTTCACGAGTTCAAGTTTAGCAAAGTCTGGAGAGAT | |
| | GAGCACTACGTGAAGATCCAGGTGAAGAGCTCCGCTCAGAACTCC | |
| | GTGATCATCGTGGATAAGAACGGCCGGCTGGTGTACCTGGTGGAG | |
| | AACCCTGGCGGATACGTGGCTTACTCTAAGGCCGCTACCGTGACA | |
| | GGCAAGCTGGTGCACGCCAACTTCGGAACCAAGAAGGACTTTGA | |
| | GGATCTGTACACACCAGTGAACGGCTCTATCGTGATCGTGCGCGC | |
| | TGGAAAGATCACCTTCGCCGAGAAGGTGGCTAACGCCGAGAGCCT | |
| | GAACGCCATCGGCGTGCTGATCTACATGGATCAGACAAAGTTTCC | |
| | CATCGTGAACGCTGAGCTGTCTTTCTTTGGACACGCTCACCTGGGC | |
| | ACCGGAGACCCATACACACCCGGATTCCCTAGCTTTAACCACACC | |
| | CAGTTCCCCCCTTCCAGGTCTAGCGGACTGCCAAACATCCCCGTG | |
| | CAGACAATCAGCAGAGCCGCTGCCGAGAAGCTGTTTGGCAACATG | |
| | GAGGGAGACTGCCCCTCCGATTGGAAGACCGACTCTACATGTAGG | |
| | ATGGTGACCTCCGAGTCAAAAAATGTCAAACTCACCGTGTCCAAT | |
| | GTGCTGAAAGAACGACGCATCCTGAATATCTTTGGAGTTATTAAA | |
| | GGTTATGAGGAACCAGGTAAAGACCTGCTTTGTACTTTTTCACTTT | |
| | ACTGTTTTGCTTACTGTAGATAGGTCTAGTGCAGGAAGGAGAAGG | |
| | ATGCTAGCTTGGCATGAACTGCTATATCTTGTTTGTCCTAATGTGA | |
| | ACTTTGTAATATATGTGTATATAACACATAATATGGCCATGTAAGT | |
| | GTATGGAGAGGCCAGAGTTAAGTATTAAATATCTTTCTGTAATCA | |
| | TTTAAAATTTTACATATGAAGGTCAGTGAACAGATTGAAGGAGTT | |
| | TTGTCCAGGTGGGACTTGGATCTAAATTTTTTACAATGCCTGGCAG | |
| | CAAACACCTTTTTAATCAACTGAGCTGTCTCCCCAAATAAAGTGA | |
| | ATGTGATATCAGCTTGTGGATAATTTTTTTTTGTTGCTTTGATAAG | |
| | TGGTTTTCTTACAGGATCACATACCAGTTCTGTCCATAGCATTAAA | |
| | CAAACATAACTGTCATGCAGTAGATTAATGTGCAGGGCACATCCA | |
| | ACAGTCACATTTATTAATAGGACAAAAAGTTGGACCTTATATGTA | |
| | GCACACCTATAATTCCAGTGCTAGGAAGATCCGGGTAGGAGATCC | |
| | TTAGTTCGGTGCTACTTAGTGAGGGTTTGTTTCAAAAAACAAAAG | |
| | CTATGATGGTGTGTTGCCTTTTTTCTTTTAGACCGTTATGTTGTAGT | |
| | AGGAGCCCAGAGAGACGCTTTGGGTGCTGGTGTTGCGGCGAAGTC | |
| | CAGTGTGGGAACAGGTCTTCTGTTGAAACTTGCCCAAGTATTCTC | |
| | AGATATGATTTCAAAAGGT | |
| 268 | APELLGGPSVFLFPPKPKDTLMISRTPEVTCVVVDVSHEDPEVKFNW | Clone CH3C.35.20.1.1 |
| | YVDGVEVHNAKTKPREEQYNSTYRVVSVLTVLHQDWLNGKEYKCK | |
| | VSNKALPAPIEKTISKAKGQPREPQVYTLPPSRDELTKNQVSLTCLVK | |
| | GFYPSDIAVEWESFGTEWSSYKTTPPVLDSDGSFFLYSKLTVSKEEW | |
| | QQGFVFSCSVMHEALHNHYTQKSLSLSPGK | |
| 269 | APELLGGPSVFLFPPKPKDTLMISRTPEVTCVVVDVSHEDPEVKFNW | Clone CH3C.35.23.2.1 |
| | YVDGVEVHNAKTKPREEQYNSTYRVVSVLTVLHQDWLNGKEYKCK | |
| | VSNKALPAPIEKTISKAKGQPREPQVYTLPPSRDELTKNQVSLTCLVK | |
| | GFYPSDIAVEWESYGTEWANYKTTPPVLDSDGSFFLYSKLTVSKSEW | |
| | QQGFVFSCSVMHEALHNHYTQKSLSLSPGK | |
| 270 | APELLGGPSVFLFPPKPKDTLMISRTPEVTCVVVDVSHEDPEVKFNW | Clone CH3C.35.23.1.1 |
| | YVDGVEVHNAKTKPREEQYNSTYRVVSVLTVLHQDWLNGKEYKCK | |
| | VSNKALPAPIEKTISKAKGQPREPQVYTLPPSRDELTKNQVSLTCLVK | |
| | GFYPSDIAVEWESFGTEWSNYKTTPPVLDSDGSFFLYSKLTVSKEEW | |
| | QQGFVFSCSVMHEALHNHYTQKSLSLSPGK | |
| 271 | APELLGGPSVFLFPPKPKDTLMISRTPEVTCVVVDVSHEDPEVKFNW | Clone CH3C.35.S413 |
| | YVDGVEVHNAKTKPREEQYNSTYRVVSVLTVLHQDWLNGKEYKCK | |
| | VSNKALPAPIEKTISKAKGQPREPQVYTLPPSRDELTKNQVSLTCLVK | |
| | GFYPSDIAVEWESYGTEWSSYKTTPPVLDSDGSFFLYSKLTVSKSEW | |
| | QQGFVFSCSVMHEALHNHYTQKSLSLSPGK | |
| 272 | APELLGGPSVFLFPPKPKDTLMISRTPEVTCVVVDVSHEDPEVKFNW | Clone CH3C.35.23.3.1 |
| | YVDGVEVHNAKTKPREEQYNSTYRVVSVLTVLHQDWLNGKEYKCK | |
| | VSNKALPAPIEKTISKAKGQPREPQVYTLPPSRDELTKNQVSLTCLVK | |
| | GFYPSDIAVEWESYGTEWVNYKTTPPVLDSDGSFFLYSKLTVSKEEW | |
| | QQGFVFSCSVMHEALHNHYTQKSLSLSPGK | |
| 273 | APELLGGPSVFLFPPKPKDTLMISRTPEVTCVVVDVSHEDPEVKFNW | Clone CH3C.35.N390.1 |
| | YVDGVEVHNAKTKPREEQYNSTYRVVSVLTVLHQDWLNGKEYKCK | |
| | VSNKALPAPIEKTISKAKGQPREPQVYTLPPSRDELTKNQVSLTCLVK | |
| | GFYPSDIAVEWESYGTEWSNYKTTPPVLDSDGSFFLYSKLTVSKSEW | |
| | QQGFVFSCSVMHEALHNHYTQKSLSLSPGK | |
| 274 | APELLGGPSVFLFPPKPKDTLMISRTPEVTCVVVDVSHEDPEVKFNW | Clone CH3C.35.23.6.1 |
| | YVDGVEVHNAKTKPREEQYNSTYRVVSVLTVLHQDWLNGKEYKCK | |
| | VSNKALPAPIEKTISKAKGQPREPQVYTLPPSRDELTKNQVSLTCLVK | |
| | GFYPSDIAVEWESFGTEWVNYKTTPPVLDSDGSFFLYSKLTVSKEEW | |
| | QQGFVFSCSVMHEALHNHYTQKSLSLSPGK | |
| 275 | APEAAGGPSVFLFPPKPKDTLMISRTPEVTCVVVDVSHEDPEVKFNW | Clone CH3C.35.21 with |
| | YVDGVEVHNAKTKPREEQYNSTYRVVSVLTVLHQDWLNGKEYKCK | knob and LALAPG |
| | VSNKALGAPIEKTISKAKGQPREPQVYTLPPSRDELTKNQVSLWCLV | mutations |
| | KGFYPSDIAVWWESYGTEWSSYKTTPPVLDSDGSFFLYSKLTVTKEE | |
| | WQQGFVFSCSVMHEALHNHYTQKSLSLSPGK | |
| 276 | APELLGGPSVFLFPPKPKDTLYITREPEVTCVVVDVSHEDPEVKFNWY | Clone CH3C.35.21 with |
| | VDGVEVHNAKTKPREEQYNSTYRVVSVLTVLHQDWLNGKEYKCKV | knob and YTE mutations |
| | SNKALPAPIEKTISKAKGQPREPQVYTLPPSRDELTKNQVSLWCLVKG | |
| | FYPSDIAVWWESYGTEWSSYKTTPPVLDSDGSFFLYSKLTVTKEEWQ | |
| | QGFVFSCSVMHEALHNHYTQKSLSLSPGK | |
| 277 | APEAAGGPSVFLFPPKPKDTLYITREPEVTCVVVDVSHEDPEVKFNW | Clone CH3C.35.21 with |
| | YVDGVEVHNAKTKPREEQYNSTYRVVSVLTVLHQDWLNGKEYKCK | knob, LALA, and YTE |
| | VSNKALPAPIEKTISKAKGQPREPQVYTLPPSRDELTKNQVSLWCLVK | mutations |
| | GFYPSDIAVWWESYGTEWSSYKTTPPVLDSDGSFFLYSKLTVTKEEW | |
| | QQGFVFSCSVMHEALHNHYTQKSLSLSPGK | |
| 278 | APEAAGGPSVFLFPPKPKDTLYITREPEVTCVVVDVSHEDPEVKFNW | Clone CH3C.35.21 with |
| | YVDGVEVHNAKTKPREEQYNSTYRVVSVLTVLHQDWLNGKEYKCK | knob, LALAPG, and YTE |
| | VSNKALGAPIEKTISKAKGQPREPQVYTLPPSRDELTKNQVSLWCLV | mutations |
| | KGFYPSDIAVWWESYGTEWSSYKTTPPVLDSDGSFFLYSKLTVTKEE | |
| | WQQGFVFSCSVMHEALHNHYTQKSLSLSPGK | |
| 279 | APELLGGPSVFLFPPKPKDTLMISRTPEVTCVVVDVSHEDPEVKFNW | Clone CH3C.35.21 with |
| | YVDGVEVHNAKTKPREEQYNSTYRVVSVLTVLHQDWLNGKEYKCK | hole mutations |
| | VSNKALPAPIEKTISKAKGQPREPQVYTLPPSRDELTKNQVSLSCAVK | |
| | GFYPSDIAVWWESYGTEWSSYKTTPPVLDSDGSFFLVSKLTVTKEEW | |
| | QQGFVFSCSVMHEALHNHYTQKSLSLSPGK | |
| 280 | APEAAGGPSVFLFPPKPKDTLMISRTPEVTCVVVDVSHEDPEVKFNW | Clone CH3C.35.21 with |
| | YVDGVEVHNAKTKPREEQYNSTYRVVSVLTVLHQDWLNGKEYKCK | hole and LALA mutations |
| | VSNKALPAPIEKTISKAKGQPREPQVYTLPPSRDELTKNQVSLSCAVK | |
| | GFYPSDIAVWWESYGTEWSSYKTTPPVLDSDGSFFLVSKLTVTKEEW | |
| | QQGFVFSCSVMHEALHNHYTQKSLSLSPGK | |
| 281 | APEAAGGPSVFLFPPKPKDTLMISRTPEVTCVVVDVSHEDPEVKFNW | Clone CH3C.35.21 with |
| | YVDGVEVHNAKTKPREEQYNSTYRVVSVLTVLHQDWLNGKEYKCK | hole and LALAPG |
| | VSNKALGAPIEKTISKAKGQPREPQVYTLPPSRDELTKNQVSLSCAVK | mutations |
| | GFYPSDIAVWWESYGTEWSSYKTTPPVLDSDGSFFLVSKLTVTKEEW | |
| | QQGFVFSCSVMHEALHNHYTQKSLSLSPGK | |
| 282 | APELLGGPSVFLFPPKPKDTLYITREPEVTCVVVDVSHEDPEVKFNWY | Clone CH3C.35.21 with |
| | VDGVEVHNAKTKPREEQYNSTYRVVSVLTVLHQDWLNGKEYKCKV | hole and YTE mutations |
| | SNKALPAPIEKTISKAKGQPREPQVYTLPPSRDELTKNQVSLSCAVKG | |
| | FYPSDIAVWWESYGTEWSSYKTTPPVLDSDGSFFLVSKLTVTKEEWQ | |
| | QGFVFSCSVMHEALHNHYTQKSLSLSPGK | |
| 283 | APEAAGGPSVFLFPPKPKDTLYITREPEVTCVVVDVSHEDPEVKFNW | Clone CH3C.35.21 with |
| | YVDGVEVHNAKTKPREEQYNSTYRVVSVLTVLHQDWLNGKEYKCK | hole, LALA, and YTE |
| | VSNKALPAPIEKTISKAKGQPREPQVYTLPPSRDELTKNQVSLSCAVK | mutations |
| | GFYPSDIAVWWESYGTEWSSYKTTPPVLDSDGSFFLVSKLTVTKEEW | |
| | QQGFVFSCSVMHEALHNHYTQKSLSLSPGK | |
| 284 | APEAAGGPSVFLFPPKPKDTLYITREPEVTCVVVDVSHEDPEVKFNW | Clone CH3C.35.21 with |
| | YVDGVEVHNAKTKPREEQYNSTYRVVSVLTVLHQDWLNGKEYKCK | hole, LALAPG, and YTE |
| | VSNKALGAPIEKTISKAKGQPREPQVYTLPPSRDELTKNQVSLSCAVK | mutations |
| | GFYPSDIAVWWESYGTEWSSYKTTPPVLDSDGSFFLVSKLTVTKEEW | |
| | QQGFVFSCSVMHEALHNHYTQKSLSLSPGK | |
| 285 | APELLGGPSVFLFPPKPKDTLMISRTPEVTCVVVDVSHEDPEVKFNW | Clone CH3C.35.20.1.1 |
| | YVDGVEVHNAKTKPREEQYNSTYRVVSVLTVLHQDWLNGKEYKCK | with knob mutation |
| | VSNKALPAPIEKTISKAKGQPREPQVYTLPPSRDELTKNQVSLWCLVK | |
| | GFYPSDIAVEWESFGTEWSSYKTTPPVLDSDGSFFLYSKLTVSKEEW | |
| | QQGFVFSCSVMHEALHNHYTQKSLSLSPGK | |
| 286 | APEAAGGPSVFLFPPKPKDTLMISRTPEVTCVVVDVSHEDPEVKFNW | Clone CH3C.35.20.1.1 |
| | YVDGVEVHNAKTKPREEQYNSTYRVVSVLTVLHQDWLNGKEYKCK | with knob and LALA |
| | VSNKALPAPIEKTISKAKGQPREPQVYTLPPSRDELTKNQVSLWCLVK | mutations |
| | GFYPSDIAVEWESFGTEWSSYKTTPPVLDSDGSFFLYSKLTVSKEEW | |
| | QQGFVFSCSVMHEALHNHYTQKSLSLSPGK | |
| 287 | APEAAGGPSVFLFPPKPKDTLMISRTPEVTCVVVDVSHEDPEVKFNW | Clone CH3C.35.20.1.1 |
| | YVDGVEVHNAKTKPREEQYNSTYRVVSVLTVLHQDWLNGKEYKCK | with knob and LALAPG |
| | VSNKALGAPIEKTISKAKGQPREPQVYTLPPSRDELTKNQVSLWCLV | mutations |
| | KGFYPSDIAVEWESFGTEWSSYKTTPPVLDSDGSFFLYSKLTVSKEE | |
| | WQQGFVFSCSVMHEALHNHYTQKSLSLSPGK | |
| 288 | APELLGGPSVFLFPPKPKDTLYITREPEVTCVVVDVSHEDPEVKFNWY | Clone CH3C.35.20.1.1 |
| | VDGVEVHNAKTKPREEQYNSTYRVVSVLTVLHQDWLNGKEYKCKV | with knob and YTE |
| | SNKALPAPIEKTISKAKGQPREPQVYTLPPSRDELTKNQVSLWCLVKG | mutations |
| | FYPSDIAVEWESFGTEWSSYKTTPPVLDSDGSFFLYSKLTVSKEEWQ | |
| | QGFVFSCSVMHEALHNHYTQKSLSLSPGK | |
| 289 | APEAAGGPSVFLFPPKPKDTLYITREPEVTCVVVDVSHEDPEVKFNW | Clone CH3C.35.20.1.1 |
| | YVDGVEVHNAKTKPREEQYNSTYRVVSVLTVLHQDWLNGKEYKCK | with knob, LALA, and |
| | VSNKALPAPIEKTISKAKGQPREPQVYTLPPSRDELTKNQVSLWCLVK | YTE mutations |
| | GFYPSDIAVEWESFGTEWSSYKTTPPVLDSDGSFFLYSKLTVSKEEW | |
| | QQGFVFSCSVMHEALHNHYTQKSLSLSPGK | |
| 290 | APEAAGGPSVFLFPPKPKDTLYITREPEVTCVVVDVSHEDPEVKFNW | Clone CH3C.35.20.1.1 |
| | YVDGVEVHNAKTKPREEQYNSTYRVVSVLTVLHQDWLNGKEYKCK | with knob, LALAPG, and |
| | VSNKALGAPIEKTISKAKGQPREPQVYTLPPSRDELTKNQVSLWCLV | YTE mutations |
| | KGFYPSDIAVEWESFGTEWSSYKTTPPVLDSDGSFFLYSKLTVSKEE | |
| | WQQGFVFSCSVMHEALHNHYTQKSLSLSPGK | |
| 291 | APELLGGPSVFLFPPKPKDTLMISRTPEVTCVVVDVSHEDPEVKFNW | Clone CH3C.35.20.1.1 |
| | YVDGVEVHNAKTKPREEQYNSTYRVVSVLTVLHQDWLNGKEYKCK | with hole mutations |
| | VSNKALPAPIEKTISKAKGQPREPQVYTLPPSRDELTKNQVSLSCAVK | |
| | GFYPSDIAVEWESFGTEWSSYKTTPPVLDSDGSFFLVSKLTVSKEEW | |
| | QQGFVFSCSVMHEALHNHYTQKSLSLSPGK | |
| 292 | APEAAGGPSVFLFPPKPKDTLMISRTPEVTCVVVDVSHEDPEVKFNW | Clone CH3C.35.20.1.1 |
| | YVDGVEVHNAKTKPREEQYNSTYRVVSVLTVLHQDWLNGKEYKCK | with hole and LALA |
| | VSNKALPAPIEKTISKAKGQPREPQVYTLPPSRDELTKNQVSLSCAVK | mutations |
| | GFYPSDIAVEWESFGTEWSSYKTTPPVLDSDGSFFLVSKLTVSKEEW | |
| | QQGFVFSCSVMHEALHNHYTQKSLSLSPGK | |
| 293 | APEAAGGPSVFLFPPKPKDTLMISRTPEVTCVVVDVSHEDPEVKFNW | Clone CH3C.35.20.1.1 |
| | YVDGVEVHNAKTKPREEQYNSTYRVVSVLTVLHQDWLNGKEYKCK | with hole and LALAPG |
| | VSNKALGAPIEKTISKAKGQPREPQVYTLPPSRDELTKNQVSLSCAVK | mutations |
| | GFYPSDIAVEWESFGTEWSSYKTTPPVLDSDGSFFLVSKLTVSKEEW | |
| | QQGFVFSCSVMHEALHNHYTQKSLSLSPGK | |
| 294 | APELLGGPSVFLFPPKPKDTLYITREPEVTCVVVDVSHEDPEVKFNWY | Clone CH3C.35.20.1.1 |
| | VDGVEVHNAKTKPREEQYNSTYRVVSVLTVLHQDWLNGKEYKCKV | with hole and YTE |
| | SNKALPAPIEKTISKAKGQPREPQVYTLPPSRDELTKNQVSLSCAVKG | mutations |
| | FYPSDIAVEWESFGTEWSSYKTTPPVLDSDGSFFLVSKLTVSKEEWQ | |
| | QGFVFSCSVMHEALHNHYTQKSLSLSPGK | |
| 295 | APEAAGGPSVFLFPPKPKDTLYITREPEVTCVVVDVSHEDPEVKFNW | Clone CH3C.35.20.1.1 |
| | YVDGVEVHNAKTKPREEQYNSTYRVVSVLTVLHQDWLNGKEYKCK | with hole, LALA, and |
| | VSNKALPAPIEKTISKAKGQPREPQVYTLPPSRDELTKNQVSLSCAVK | YTE mutations |
| | GFYPSDIAVEWESFGTEWSSYKTTPPVLDSDGSFFLVSKLTVSKEEW | |
| | QQGFVFSCSVMHEALHNHYTQKSLSLSPGK | |
| 296 | APEAAGGPSVFLFPPKPKDTLYITREPEVTCVVVDVSHEDPEVKFNW | Clone CH3C.35.20.1.1 |
| | YVDGVEVHNAKTKPREEQYNSTYRVVSVLTVLHQDWLNGKEYKCK | with hole, LALAPG, and |
| | VSNKALGAPIEKTISKAKGQPREPQVYTLPPSRDELTKNQVSLSCAVK | YTE mutations |
| | GFYPSDIAVEWESFGTEWSSYKTTPPVLDSDGSFFLVSKLTVSKEEW | |
| | QQGFVFSCSVMHEALHNHYTQKSLSLSPGK | |
| 297 | APELLGGPSVFLFPPKPKDTLMISRTPEVTCVVVDVSHEDPEVKFNW | Clone CH3C.35.23.2.1 |
| | YVDGVEVHNAKTKPREEQYNSTYRVVSVLTVLHQDWLNGKEYKCK | with knob mutation |
| | VSNKALPAPIEKTISKAKGQPREPQVYTLPPSRDELTKNQVSLWCLVK | |
| | GFYPSDIAVEWESYGTEWANYKTTPPVLDSDGSFFLYSKLTVSKSEW | |
| | QQGFVFSCSVMHEALHNHYTQKSLSLSPGK | |
| 298 | APEAAGGPSVFLFPPKPKDTLMISRTPEVTCVVVDVSHEDPEVKFNW | Clone CH3C.35.23.2.1 |
| | YVDGVEVHNAKTKPREEQYNSTYRVVSVLTVLHQDWLNGKEYKCK | with knob and LALA |
| | VSNKALPAPIEKTISKAKGQPREPQVYTLPPSRDELTKNQVSLWCLVK | mutations |
| | GFYPSDIAVEWESYGTEWANYKTTPPVLDSDGSFFLYSKLTVSKSEW | |
| | QQGFVFSCSVMHEALHNHYTQKSLSLSPGK | |
| 299 | APEAAGGPSVFLFPPKPKDTLMISRTPEVTCVVVDVSHEDPEVKFNW | Clone CH3C.35.23.2.1 |
| | YVDGVEVHNAKTKPREEQYNSTYRVVSVLTVLHQDWLNGKEYKCK | with knob and LALAPG |
| | VSNKALGAPIEKTISKAKGQPREPQVYTLPPSRDELTKNQVSLWCLV | mutations |
| | KGFYPSDIAVEWESYGTEWANYKTTPPVLDSDGSFFLYSKLTVSKSE | |
| | WQQGFVFSCSVMHEALHNHYTQKSLSLSPGK | |
| 300 | APELLGGPSVFLFPPKPKDTLYITREPEVTCVVVDVSHEDPEVKFNWY | Clone CH3C.35.23.2.1 |
| | VDGVEVHNAKTKPREEQYNSTYRVVSVLTVLHQDWLNGKEYKCKV | with knob and YTE |
| | SNKALPAPIEKTISKAKGQPREPQVYTLPPSRDELTKNQVSLWCLVKG | mutations |
| | FYPSDIAVEWESYGTEWANYKTTPPVLDSDGSFFLYSKLTVSKSEWQ | |
| | QGFVFSCSVMHEALHNHYTQKSLSLSPGK | |
| 301 | APEAAGGPSVFLFPPKPKDTLYITREPEVTCVVVDVSHEDPEVKFNW | Clone CH3C.35.23.2.1 |
| | YVDGVEVHNAKTKPREEQYNSTYRVVSVLTVLHQDWLNGKEYKCK | with knob, LALA, and |
| | VSNKALPAPIEKTISKAKGQPREPQVYTLPPSRDELTKNQVSLWCLVK | YTE mutations |
| | GFYPSDIAVEWESYGTEWANYKTTPPVLDSDGSFFLYSKLTVSKSEW | |
| | QQGFVFSCSVMHEALHNHYTQKSLSLSPGK | |
| 302 | APEAAGGPSVFLFPPKPKDTLYITREPEVTCVVVDVSHEDPEVKFNW | Clone CH3C.35.23.2.1 |
| | YVDGVEVHNAKTKPREEQYNSTYRVVSVLTVLHQDWLNGKEYKCK | with knob, LALAPG, and |
| | VSNKALGAPIEKTISKAKGQPREPQVYTLPPSRDELTKNQVSLWCLV | YTE mutations |
| | KGFYPSDIAVEWESYGTEWANYKTTPPVLDSDGSFFLYSKLTVSKSE | |
| | WQQGFVFSCSVMHEALHNHYTQKSLSLSPGK | |
| 303 | APELLGGPSVFLFPPKPKDTLMISRTPEVTCVVVDVSHEDPEVKFNW | Clone CH3C.35.23.2.1 |
| | YVDGVEVHNAKTKPREEQYNSTYRVVSVLTVLHQDWLNGKEYKCK | with hole mutations |
| | VSNKALPAPIEKTISKAKGQPREPQVYTLPPSRDELTKNQVSLSCAVK | |
| | GFYPSDIAVEWESYGTEWANYKTTPPVLDSDGSFFLVSKLTVSKSEW | |
| | QQGFVFSCSVMHEALHNHYTQKSLSLSPGK | |
| 304 | APEAAGGPSVFLFPPKPKDTLMISRTPEVTCVVVDVSHEDPEVKFNW | Clone CH3C.35.23.2.1 |
| | YVDGVEVHNAKTKPREEQYNSTYRVVSVLTVLHQDWLNGKEYKCK | with hole and LALA |
| | VSNKALPAPIEKTISKAKGQPREPQVYTLPPSRDELTKNQVSLSCAVK | mutations |
| | GFYPSDIAVEWESYGTEWANYKTTPPVLDSDGSFFLVSKLTVSKSEW | |
| | QQGFVFSCSVMHEALHNHYTQKSLSLSPGK | |
| 305 | APEAAGGPSVFLFPPKPKDTLMISRTPEVTCVVVDVSHEDPEVKFNW | Clone CH3C.35.23.2.1 |
| | YVDGVEVHNAKTKPREEQYNSTYRVVSVLTVLHQDWLNGKEYKCK | with hole and LALAPG |
| | VSNKALGAPIEKTISKAKGQPREPQVYTLPPSRDELTKNQVSLSCAVK | mutations |
| | GFYPSDIAVEWESYGTEWANYKTTPPVLDSDGSFFLVSKLTVSKSEW | |
| | QQGFVFSCSVMHEALHNHYTQKSLSLSPGK | |
| 306 | APELLGGPSVFLFPPKPKDTLYITREPEVTCVVVDVSHEDPEVKFNWY | Clone CH3C.35.23.2.1 |
| | VDGVEVHNAKTKPREEQYNSTYRVVSVLTVLHQDWLNGKEYKCKV | with hole and YTE |
| | SNKALPAPIEKTISKAKGQPREPQVYTLPPSRDELTKNQVSLSCAVKG | mutations |
| | FYPSDIAVEWESYGTEWANYKTTPPVLDSDGSFFLVSKLTVSKSEWQ | |
| | QGFVFSCSVMHEALHNHYTQKSLSLSPGK | |
| 307 | APEAAGGPSVFLFPPKPKDTLYITREPEVTCVVVDVSHEDPEVKFNW | Clone CH3C.35.23.2.1 |
| | YVDGVEVHNAKTKPREEQYNSTYRVVSVLTVLHQDWLNGKEYKCK | with hole, LALA, and |
| | VSNKALPAPIEKTISKAKGQPREPQVYTLPPSRDELTKNQVSLSCAVK | YTE mutations |
| | GFYPSDIAVEWESYGTEWANYKTTPPVLDSDGSFFLVSKLTVSKSEW | |
| | QQGFVFSCSVMHEALHNHYTQKSLSLSPGK | |
| 308 | APEAAGGPSVFLFPPKPKDTLYITREPEVTCVVVDVSHEDPEVKFNW | Clone CH3C.35.23.2.1 |
| | YVDGVEVHNAKTKPREEQYNSTYRVVSVLTVLHQDWLNGKEYKCK | with hole, LALAPG, and |
| | VSNKALGAPIEKTISKAKGQPREPQVYTLPPSRDELTKNQVSLSCAVK | YTE mutations |
| | GFYPSDIAVEWESYGTEWANYKTTPPVLDSDGSFFLVSKLTVSKSEW | |
| | QQGFVFSCSVMHEALHNHYTQKSLSLSPGK | |
| 309 | APELLGGPSVFLFPPKPKDTLMISRTPEVTCVVVDVSHEDPEVKFNW | Clone CH3C.35.23.1.1 |
| | YVDGVEVHNAKTKPREEQYNSTYRVVSVLTVLHQDWLNGKEYKCK | with knob mutation |
| | VSNKALPAPIEKTISKAKGQPREPQVYTLPPSRDELTKNQVSLWCLVK | |
| | GFYPSDIAVEWESFGTEWSNYKTTPPVLDSDGSFFLYSKLTVSKEEW | |
| | QQGFVFSCSVMHEALHNHYTQKSLSLSPGK | |
| 310 | APEAAGGPSVFLFPPKPKDTLMISRTPEVTCVVVDVSHEDPEVKFNW | Clone CH3C.35.23.1.1 |
| | YVDGVEVHNAKTKPREEQYNSTYRVVSVLTVLHQDWLNGKEYKCK | with knob and LALA |
| | VSNKALPAPIEKTISKAKGQPREPQVYTLPPSRDELTKNQVSLWCLVK | mutations |
| | GFYPSDIAVEWESFGTEWSNYKTTPPVLDSDGSFFLYSKLTVSKEEW | |
| | QQGFVFSCSVMHEALHNHYTQKSLSLSPGK | |
| 311 | APEAAGGPSVFLFPPKPKDTLMISRTPEVTCVVVDVSHEDPEVKFNW | Clone CH3C.35.23.1.1 |
| | YVDGVEVHNAKTKPREEQYNSTYRVVSVLTVLHQDWLNGKEYKCK | with knob and LALAPG |
| | VSNKALGAPIEKTISKAKGQPREPQVYTLPPSRDELTKNQVSLWCLV | mutations |
| | KGFYPSDIAVEWESFGTEWSNYKTTPPVLDSDGSFFLYSKLTVSKEE | |
| | WQQGFVFSCSVMHEALHNHYTQKSLSLSPGK | |
| 312 | APELLGGPSVFLFPPKPKDTLYITREPEVTCVVVDVSHEDPEVKFNWY | Clone CH3C.35.23.1.1 |
| | VDGVEVHNAKTKPREEQYNSTYRVVSVLTVLHQDWLNGKEYKCKV | with knob and YTE |
| | SNKALPAPIEKTISKAKGQPREPQVYTLPPSRDELTKNQVSLWCLVKG | mutations |
| | FYPSDIAVEWESFGTEWSNYKTTPPVLDSDGSFFLYSKLTVSKEEWQ | |
| | QGFVFSCSVMHEALHNHYTQKSLSLSPGK | |
| 313 | APEAAGGPSVFLFPPKPKDTLYITREPEVTCVVVDVSHEDPEVKFNW | Clone CH3C.35.23.1.1 |
| | YVDGVEVHNAKTKPREEQYNSTYRVVSVLTVLHQDWLNGKEYKCK | with knob, LALA, and |
| | VSNKALPAPIEKTISKAKGQPREPQVYTLPPSRDELTKNQVSLWCLVK | YTE mutations |
| | GFYPSDIAVEWESFGTEWSNYKTTPPVLDSDGSFFLYSKLTVSKEEW | |
| | QQGFVFSCSVMHEALHNHYTQKSLSLSPGK | |
| 314 | APEAAGGPSVFLFPPKPKDTLYITREPEVTCVVVDVSHEDPEVKFNW | Clone CH3C.35.23.1.1 |
| | YVDGVEVHNAKTKPREEQYNSTYRVVSVLTVLHQDWLNGKEYKCK | with knob, LALAPG, and |
| | VSNKALGAPIEKTISKAKGQPREPQVYTLPPSRDELTKNQVSLWCLV | YTE mutations |
| | KGFYPSDIAVEWESFGTEWSNYKTTPPVLDSDGSFFLYSKLTVSKEE | |
| | WQQGFVFSCSVMHEALHNHYTQKSLSLSPGK | |
| 315 | APELLGGPSVFLFPPKPKDTLMISRTPEVTCVVVDVSHEDPEVKFNW | Clone CH3C.3523.1.1 |
| | YVDGVEVHNAKTKPREEQYNSTYRVVSVLTVLHQDWLNGKEYKCK | with hole mutations |
| | VSNKALPAPIEKTISKAKGQPREPQVYTLPPSRDELTKNQVSLSCAVK | |
| | GFYPSDIAVEWESFGTEWSNYKTTPPVLDSDGSFFLVSKLTVSKEEW | |
| | QQGFVFSCSVMHEALHNHYTQKSLSLSPGK | |
| 316 | APEAAGGPSVFLFPPKPKDTLMISRTPEVTCVVVDVSHEDPEVKFNW | Clone CH3C.35.23.1.1 |
| | YVDGVEVHNAKTKPREEQYNSTYRVVSVLTVLHQDWLNGKEYKCK | with hole and LALA |
| | VSNKALPAPIEKTISKAKGQPREPQVYTLPPSRDELTKNQVSLSCAVK | mutations |
| | GFYPSDIAVEWESFGTEWSNYKTTPPVLDSDGSFFLVSKLTVSKEEW | |
| | QQGFVFSCSVMHEALHNHYTQKSLSLSPGK | |
| 317 | APEAAGGPSVFLFPPKPKDTLMISRTPEVTCVVVDVSHEDPEVKFNW | Clone CH3C.35.23.1.1 |
| | YVDGVEVHNAKTKPREEQYNSTYRVVSVLTVLHQDWLNGKEYKCK | with hole and LALAPG |
| | VSNKALGAPIEKTISKAKGQPREPQVYTLPPSRDELTKNQVSLSCAVK | mutations |
| | GFYPSDIAVEWESFGTEWSNYKTTPPVLDSDGSFFLVSKLTVSKEEW | |
| | QQGFVFSCSVMHEALHNHYTQKSLSLSPGK | |
| 318 | APELLGGPSVFLFPPKPKDTLYITREPEVTCVVVDVSHEDPEVKFNWY | Clone CH3C.35.23.1.1 |
| | VDGVEVHNAKTKPREEQYNSTYRVVSVLTVLHQDWLNGKEYKCKV | with hole and YTE |
| | SNKALPAPIEKTISKAKGQPREPQVYTLPPSRDELTKNQVSLSCAVKG | mutations |
| | FYPSDIAVEWESFGTEWSNYKTTPPVLDSDGSFFLVSKLTVSKEEWQ | |
| | QGFVFSCSVMHEALHNHYTQKSLSLSPGK | |
| 319 | APEAAGGPSVFLFPPKPKDTLYITREPEVTCVVVDVSHEDPEVKFNW | Clone CH3C.35.23.1.1 |
| | YVDGVEVHNAKTKPREEQYNSTYRVVSVLTVLHQDWLNGKEYKCK | with hole, LALA, and |
| | VSNKALPAPIEKTISKAKGQPREPQVYTLPPSRDELTKNQVSLSCAVK | YTE mutations |
| | GFYPSDIAVEWESFGTEWSNYKTTPPVLDSDGSFFLVSKLTVSKEEW | |
| | QQGFVFSCSVMHEALHNHYTQKSLSLSPGK | |
| 320 | APEAAGGPSVFLFPPKPKDTLYITREPEVTCVVVDVSHEDPEVKFNW | Clone CH3C.35.23.1.1 |
| | YVDGVEVHNAKTKPREEQYNSTYRVVSVLTVLHQDWLNGKEYKCK | with hole, LALAPG, and |
| | VSNKALGAPIEKTISKAKGQPREPQVYTLPPSRDELTKNQVSLSCAVK | YTE mutations |
| | GFYPSDIAVEWESFGTEWSNYKTTPPVLDSDGSFFLVSKLTVSKEEW | |
| | QQGFVFSCSVMHEALHNHYTQKSLSLSPGK | |
| 321 | APELLGGPSVFLFPPKPKDTLMISRTPEVTCVVVDVSHEDPEVKFNW | Clone CH3C.35.20.1 |
| | YVDGVEVHNAKTKPREEQYNSTYRVVSVLTVLHQDWLNGKEYKCK | M198L and N204S |
| | VSNKALPAPIEKTISKAKGQPREPQVYTLPPSRDELTKNQVSLTCLVK | mutations |
| | GFYPSDIAVEWESFGTEWSSYKTTPPVLDSDGSFFLYSKLTVTKEEW | |
| | QQGFVFSCSVLHEALHSHYTQKSLSLSPGK | |
| 322 | APELLGGPSVFLFPPKPKDTLMISRTPEVTCVVVDVSHEDPEVKFNW | Clone CH3C.35.20.1 with |
| | YVDGVEVHNAKTKPREEQYNSTYRVVSVLTVLHQDWLNGKEYKCK | knob and M198L and |
| | VSNKALPAPIEKTISKAKGQPREPQVYTLPPSRDELTKNQVSLWCLVK | N204S mutations |
| | GFYPSDIAVEWESFGTEWSSYKTTPPVLDSDGSFFLYSKLTVTKEEW | |
| | QQGFVFSCSVLHEALHSHYTQKSLSLSPGK | |
| 323 | APEAAGGPSVFLFPPKPKDTLMISRTPEVTCVVVDVSHEDPEVKFNW | Clone CH3C.35.20.1 with |
| | YVDGVEVHNAKTKPREEQYNSTYRVVSVLTVLHQDWLNGKEYKCK | knob, LALA, and M198L |
| | VSNKALPAPIEKTISKAKGQPREPQVYTLPPSRDELTKNQVSLWCLVK | and N204S mutations |
| | GFYPSDIAVEWESFGTEWSSYKTTPPVLDSDGSFFLYSKLTVTKEEW | |
| | QQGFVFSCSVLHEALHSHYTQKSLSLSPGK | |
| 324 | APEAAGGPSVFLFPPKPKDTLMISRTPEVTCVVVDVSHEDPEVKFNW | Clone CH3C.35.20.1 with |
| | YVDGVEVHNAKTKPREEQYNSTYRVVSVLTVLHQDWLNGKEYKCK | knob LALAPG and |
| | VSNKALGAPIEKTISKAKGQPREPQVYTLPPSRDELTKNQVSLWCLV | M198L and N204S |
| | KGFYPSDIAVEWESFGTEWSSYKTTPPVLDSDGSFFLYSKLTVTKEE | mutations |
| | WQQGFVFSCSVLHEALHSHYTQKSLSLSPGK | |
| 325 | APELLGGPSVFLFPPKPKDTLMISRTPEVTCVVVDVSHEDPEVKFNW | Clone CH3C.35.20.1 with |
| | YVDGVEVHNAKTKPREEQYNSTYRVVSVLTVLHQDWLNGKEYKCK | hole and M198L and |
| | VSNKALPAPIEKTISKAKGQPREPQVYTLPPSRDELTKNQVSLSCAVK | N204S mutations |
| | GFYPSDIAVEWESFGTEWSSYKTTPPVLDSDGSFFLVSKLTVTKEEW | |
| | QQGFVFSCSVLHEALHSHYTQKSLSLSPGK | |
| 326 | APEAAGGPSVFLFPPKPKDTLMISRTPEVTCVVVDVSHEDPEVKFNW | Clone CH3C.35.20.1 with |
| | YVDGVEVHNAKTKPREEQYNSTYRVVSVLTVLHQDWLNGKEYKCK | hole, LALA, and M198L |
| | VSNKALPAPIEKTISKAKGQPREPQVYTLPPSRDELTKNQVSLSCAVK | and N204S mutations |
| | GFYPSDIAVEWESFGTEWSSYKTTPPVLDSDGSFFLVSKLTVTKEEW | |
| | QQGFVFSCSVLHEALHSHYTQKSLSLSPGK | |
| 327 | APEAAGGPSVFLFPPKPKDTLMISRTPEVTCVVVDVSHEDPEVKFNW | Clone CH3C.35.20.1 with |
| | YVDGVEVHNAKTKPREEQYNSTYRVVSVLTVLHQDWLNGKEYKCK | hole LALAPG and |
| | VSNKALGAPIEKTISKAKGQPREPQVYTLPPSRDELTKNQVSLSCAVK | M198L and N204S |
| | GFYPSDIAVEWESFGTEWSSYKTTPPVLDSDGSFFLVSKLTVTKEEW | mutations |
| | QQGFVFSCSVLHEALHSHYTQKSLSLSPGK | |
| 328 | APELLGGPSVFLFPPKPKDTLMISRTPEVTCVVVDVSHEDPEVKFNW | Clone CH3C.35.23.2 with |
| | YVDGVEVHNAKTKPREEQYNSTYRVVSVLTVLHQDWLNGKEYKCK | M198L and N204S |
| | VSNKALPAPIEKTISKAKGQPREPQVYTLPPSRDELTKNQVSLTCLVK | mutations |
| | GFYPSDIAVEWESYGTEWANYKTTPPVLDSDGSFFLYSKLTVTKEEW | |
| | QQGFVFSCSVLHEALHSHYTQKSLSLSPGK | |
| 329 | APELLGGPSVFLFPPKPKDTLMISRTPEVTCVVVDVSHEDPEVKFNW | Clone CH3C.35.23.2 with |
| | YVDGVEVHNAKTKPREEQYNSTYRVVSVLTVLHQDWLNGKEYKCK | knob and M198L and |
| | VSNKALPAPIEKTISKAKGQPREPQVYTLPPSRDELTKNQVSLWCLVK | N204S mutations |
| | GFYPSDIAVEWESYGTEWANYKTTPPVLDSDGSFFLYSKLTVTKEEW | |
| | QQGFVFSCSVLHEALHSHYTQKSLSLSPGK | |
| 330 | APEAAGGPSVFLFPPKPKDTLMISRTPEVTCVVVDVSHEDPEVKFNW | Clone CH3C.35.23.2 with |
| | YVDGVEVHNAKTKPREEQYNSTYRVVSVLTVLHQDWLNGKEYKCK | knob, LALA, and M198L |
| | VSNKALPAPIEKTISKAKGQPREPQVYTLPPSRDELTKNQVSLWCLVK | and N204S mutations |
| | GFYPSDIAVEWESYGTEWANYKTTPPVLDSDGSFFLYSKLTVTKEEW | |
| | QQGFVFSCSVLHEALHSHYTQKSLSLSPGK | |
| 331 | APEAAGGPSVFLFPPKPKDTLMISRTPEVTCVVVDVSHEDPEVKFNW | Clone CH3C.35.23.2 with |
| | YVDGVEVHNAKTKPREEQYNSTYRVVSVLTVLHQDWLNGKEYKCK | knob LALAPG and |
| | VSNKALGAPIEKTISKAKGQPREPQVYTLPPSRDELTKNQVSLWCLV | M198L and N204S |
| | KGFYPSDIAVEWESYGTEWANYKTTPPVLDSDGSFFLYSKLTVTKEE | mutations |
| | WQQGFVFSCSVLHEALHSHYTQKSLSLSPGK | |
| 332 | APELLGGPSVFLFPPKPKDTLMISRTPEVTCVVVDVSHEDPEVKFNW | Clone CH3C.35.23.2 with |
| | YVDGVEVHNAKTKPREEQYNSTYRVVSVLTVLHQDWLNGKEYKCK | hole and M198L and |
| | VSNKALPAPIEKTISKAKGQPREPQVYTLPPSRDELTKNQVSLSCAVK | N204S mutations |
| | GFYPSDIAVEWESYGTEWANYKTTPPVLDSDGSFFLVSKLTVTKEEW | |
| | QQGFVFSCSVLHEALHSHYTQKSLSLSPGK | |
| 333 | APEAAGGPSVFLFPPKPKDTLMISRTPEVTCVVVDVSHEDPEVKFNW | Clone CH3C.35.23.2 with |
| | YVDGVEVHNAKTKPREEQYNSTYRVVSVLTVLHQDWLNGKEYKCK | hole, LALA, and M198L |
| | VSNKALPAPIEKTISKAKGQPREPQVYTLPPSRDELTKNQVSLSCAVK | and N204S mutations |
| | GFYPSDIAVEWESYGTEWANYKTTPPVLDSDGSFFLVSKLTVTKEEW | |
| | QQGFVFSCSVLHEALHSHYTQKSLSLSPGK | |
| 334 | APEAAGGPSVFLFPPKPKDTLMISRTPEVTCVVVDVSHEDPEVKFNW | Clone CH3C.35.23.2 with |
| | YVDGVEVHNAKTKPREEQYNSTYRVVSVLTVLHQDWLNGKEYKCK | hole, LALAPG, and |
| | VSNKALGAPIEKTISKAKGQPREPQVYTLPPSRDELTKNQVSLSCAVK | M198L and N204S |
| | GFYPSDIAVEWESYGTEWANYKTTPPVLDSDGSFFLVSKLTVTKEEW | mutations |
| | QQGFVFSCSVLHEALHSHYTQKSLSLSPGK | |
| 335 | APELLGGPSVFLFPPKPKDTLMISRTPEVTCVVVDVSHEDPEVKFNW | Clone CH3C.35.23.3 with |
| | YVDGVEVHNAKTKPREEQYNSTYRVVSVLTVLHQDWLNGKEYKCK | M198L and N204S |
| | VSNKALPAPIEKTISKAKGQPREPQVYTLPPSRDELTKNQVSLTCLVK | mutations |
| | GFYPSDIAVEWESYGTEWVNYKTTPPVLDSDGSFFLYSKLTVTKEEW | |
| | QQGFVFSCSVLHEALHSHYTQKSLSLSPGK | |
| 336 | APELLGGPSVFLFPPKPKDTLMISRTPEVTCVVVDVSHEDPEVKFNW | Clone CH3C.35.23.3 with |
| | YVDGVEVHNAKTKPREEQYNSTYRVVSVLTVLHQDWLNGKEYKCK | knob and M198L and |
| | VSNKALPAPIEKTISKAKGQPREPQVYTLPPSRDELTKNQVSLWCLVK | N204S mutations |
| | GFYPSDIAVEWESYGTEWVNYKTTPPVLDSDGSFFLYSKLTVTKEEW | |
| | QQGFVFSCSVLHEALHSHYTQKSLSLSPGK | |
| 337 | APEAAGGPSVFLFPPKPKDTLMISRTPEVTCVVVDVSHEDPEVKFNW | Clone CH3C.35.23.3 with |
| | YVDGVEVHNAKTKPREEQYNSTYRVVSVLTVLHQDWLNGKEYKCK | knob, LALA, and M198L |
| | VSNKALPAPIEKTISKAKGQPREPQVYTLPPSRDELTKNQVSLWCLVK | and N204S mutations |
| | GFYPSDIAVEWESYGTEWVNYKTTPPVLDSDGSFFLYSKLTVTKEEW | |
| | QQGFVFSCSVLHEALHSHYTQKSLSLSPGK | |
| 338 | APEAAGGPSVFLFPPKPKDTLMISRTPEVTCVVVDVSHEDPEVKFNW | Clone CH3C.35.23.3 with |
| | YVDGVEVHNAKTKPREEQYNSTYRVVSVLTVLHQDWLNGKEYKCK | knob, LALAPG, and |
| | VSNKALGAPIEKTISKAKGQPREPQVYTLPPSRDELTKNQVSLWCLV | M198L and N204S |
| | KGFYPSDIAVEWESYGTEWVNYKTTPPVLDSDGSFFLYSKLTVTKEE | mutations |
| | WQQGFVFSCSVLHEALHSHYTQKSLSLSPGK | |
| 339 | APELLGGPSVFLFPPKPKDTLMISRTPEVTCVVVDVSHEDPEVKFNW | Clone CH3C.35.23.3 with |
| | YVDGVEVHNAKTKPREEQYNSTYRVVSVLTVLHQDWLNGKEYKCK | hole and M198L and |
| | VSNKALPAPIEKTISKAKGQPREPQVYTLPPSRDELTKNQVSLSCAVK | N204S mutations |
| | GFYPSDIAVEWESYGTEWVNYKTTPPVLDSDGSFFLVSKLTVTKEEW | |
| | QQGFVFSCSVLHEALHSHYTQKSLSLSPGK | |
| 340 | APEAAGGPSVFLFPPKPKDTLMISRTPEVTCVVVDVSHEDPEVKFNW | Clone CH3C.35.23.3 with |
| | YVDGVEVHNAKTKPREEQYNSTYRVVSVLTVLHQDWLNGKEYKCK | hole, LALA, and M198L |
| | VSNKALPAPIEKTISKAKGQPREPQVYTLPPSRDELTKNQVSLSCAVK | and N204S mutations |
| | GFYPSDIAVEWESYGTEWVNYKTTPPVLDSDGSFFLVSKLTVTKEEW | |
| | QQGFVFSCSVLHEALHSHYTQKSLSLSPGK | |
| 341 | APEAAGGPSVFLFPPKPKDTLMISRTPEVTCVVVDVSHEDPEVKFNW | Clone CH3C.35.23.3 with |
| | YVDGVEVHNAKTKPREEQYNSTYRVVSVLTVLHQDWLNGKEYKCK | hole, LALAPG, and |
| | VSNKALGAPIEKTISKAKGQPREPQVYTLPPSRDELTKNQVSLSCAVK | M198L and N204S |
| | GFYPSDIAVEWESYGTEWVNYKTTPPVLDSDGSFFLVSKLTVTKEEW | mutations |
| | QQGFVFSCSVLHEALHSHYTQKSLSLSPGK | |
| 342 | APELLGGPSVFLFPPKPKDTLMISRTPEVTCVVVDVSHEDPEVKFNW | Clone CH3C.35.23.4 with |
| | YVDGVEVHNAKTKPREEQYNSTYRVVSVLTVLHQDWLNGKEYKCK | M198L and N204S |
| | VSNKALPAPIEKTISKAKGQPREPQVYTLPPSRDELTKNQVSLTCLVK | mutations |
| | GFYPSDIAVEWESYGTEWSNYKTTPPVLDSDGSFFLYSKLTVSKEEW | |
| | QQGFVFSCSVLHEALHSHYTQKSLSLSPGK | |
| 343 | APELLGGPSVFLFPPKPKDTLMISRTPEVTCVVVDVSHEDPEVKFNW | Clone CH3C.35.23.4 with |
| | YVDGVEVHNAKTKPREEQYNSTYRVVSVLTVLHQDWLNGKEYKCK | knob and M198L and |
| | VSNKALPAPIEKTISKAKGQPREPQVYTLPPSRDELTKNQVSLWCLVK | N204S mutations |
| | GFYPSDIAVEWESYGTEWSNYKTTPPVLDSDGSFFLYSKLTVSKEEW | |
| | QQGFVFSCSVLHEALHSHYTQKSLSLSPGK | |
| 344 | APEAAGGPSVFLFPPKPKDTLMISRTPEVTCVVVDVSHEDPEVKFNW | Clone CH3C.35.23.4 with |
| | YVDGVEVHNAKTKPREEQYNSTYRVVSVLTVLHQDWLNGKEYKCK | knob, LALA, and M198L |
| | VSNKALPAPIEKTISKAKGQPREPQVYTLPPSRDELTKNQVSLWCLVK | and N204S mutations |
| | GFYPSDIAVEWESYGTEWSNYKTTPPVLDSDGSFFLYSKLTVSKEEW | |
| | QQGFVFSCSVLHEALHSHYTQKSLSLSPGK | |
| 345 | APEAAGGPSVFLFPPKPKDTLMISRTPEVTCVVVDVSHEDPEVKFNW | Clone CH3C.35.23.4 with |
| | YVDGVEVHNAKTKPREEQYNSTYRVVSVLTVLHQDWLNGKEYKCK | knob, LALAPG, and |
| | VSNKALGAPIEKTISKAKGQPREPQVYTLPPSRDELTKNQVSLWCLV | M198L and N204S |
| | KGFYPSDIAVEWESYGTEWSNYKTTPPVLDSDGSFFLYSKLTVSKEE | mutations |
| | WQQGFVFSCSVLHEALHSHYTQKSLSLSPGK | |
| 346 | APELLGGPSVFLFPPKPKDTLMISRTPEVTCVVVDVSHEDPEVKFNW | Clone CH3C.35.23.4 with |
| | YVDGVEVHNAKTKPREEQYNSTYRVVSVLTVLHQDWLNGKEYKCK | hole and M198L and |
| | VSNKALPAPIEKTISKAKGQPREPQVYTLPPSRDELTKNQVSLSCAVK | N204S mutations |
| | GFYPSDIAVEWESYGTEWSNYKTTPPVLDSDGSFFLVSKLTVSKEEW | |
| | QQGFVFSCSVLHEALHSHYTQKSLSLSPGK | |
| 347 | APEAAGGPSVFLFPPKPKDTLMISRTPEVTCVVVDVSHEDPEVKFNW | Clone CH3C.35.23.4 with |
| | YVDGVEVHNAKTKPREEQYNSTYRVVSVLTVLHQDWLNGKEYKCK | hole, LALA, and M198L |
| | VSNKALPAPIEKTISKAKGQPREPQVYTLPPSRDELTKNQVSLSCAVK | and N204S mutations |
| | GFYPSDIAVEWESYGTEWSNYKTTPPVLDSDGSFFLVSKLTVSKEEW | |
| | QQGFVFSCSVLHEALHSHYTQKSLSLSPGK | |
| 348 | APEAAGGPSVFLFPPKPKDTLMISRTPEVTCVVVDVSHEDPEVKFNW | Clone CH3C.35.23.4 with |
| | YVDGVEVHNAKTKPREEQYNSTYRVVSVLTVLHQDWLNGKEYKCK | hole, LALAPG, and |
| | VSNKALGAPIEKTISKAKGQPREPQVYTLPPSRDELTKNQVSLSCAVK | M198L and N204S |
| | GFYPSDIAVEWESYGTEWSNYKTTPPVLDSDGSFFLVSKLTVSKEEW | mutations |
| | QQGFVFSCSVLHEALHSHYTQKSLSLSPGK | |
| 349 | APELLGGPSVFLFPPKPKDTLMISRTPEVTCVVVDVSHEDPEVKFNW | Clone CH3C.35.21.17.2 |
| | YVDGVEVHNAKTKPREEQYNSTYRVVSVLTVLHQDWLNGKEYKCK | with M198L and N204S |
| | VSNKALPAPIEKTISKAKGQPREPQVYTLPPSRDELTKNQVSLTCLVK | mutations |
| | GFYPSDIAVLWESYGTEWASYKTTPPVLDSDGSFFLYSKLTVTKEEW | |
| | QQGFVFSCSVLHEALHSHYTQKSLSLSPGK | |
| 350 | APELLGGPSVFLFPPKPKDTLMISRTPEVTCVVVDVSHEDPEVKFNW | Clone CH3C.35.21.17.2 |
| | YVDGVEVHNAKTKPREEQYNSTYRVVSVLTVLHQDWLNGKEYKCK | with knob and M198L and |
| | VSNKALPAPIEKTISKAKGQPREPQVYTLPPSRDELTKNQVSLWCLVK | N204S mutations |
| | GFYPSDIAVLWESYGTEWASYKTTPPVLDSDGSFFLYSKLTVTKEEW | |
| | QQGFVFSCSVLHEALHSHYTQKSLSLSPGK | |
| 351 | APEAAGGPSVFLFPPKPKDTLMISRTPEVTCVVVDVSHEDPEVKFNW | Clone CH3C.35.21.17.2 |
| | YVDGVEVHNAKTKPREEQYNSTYRVVSVLTVLHQDWLNGKEYKCK | with knob, LALA, and |
| | VSNKALPAPIEKTISKAKGQPREPQVYTLPPSRDELTKNQVSLWCLVK | M198L and N204S |
| | GFYPSDIAVLWESYGTEWASYKTTPPVLDSDGSFFLYSKLTVTKEEW | mutations |
| | QQGFVFSCSVLHEALHSHYTQKSLSLSPGK | |
| 352 | APEAAGGPSVFLFPPKPKDTLMISRTPEVTCVVVDVSHEDPEVKFNW | Clone CH3C.35.21.17.2 |
| | YVDGVEVHNAKTKPREEQYNSTYRVVSVLTVLHQDWLNGKEYKCK | with knob, LALAPG, and |
| | VSNKALGAPIEKTISKAKGQPREPQVYTLPPSRDELTKNQVSLWCLV | M198L and N204S |
| | KGFYPSDIAVLWESYGTEWASYKTTPPVLDSDGSFFLYSKLTVTKEE | mutations |
| | WQQGFVFSCSVLHEALHSHYTQKSLSLSPGK | |
| 353 | APELLGGPSVFLFPPKPKDTLMISRTPEVTCVVVDVSHEDPEVKFNW | Clone CH3C.35.21.17.2 |
| | YVDGVEVHNAKTKPREEQYNSTYRVVSVLTVLHQDWLNGKEYKCK | with hole and M198L and |
| | VSNKALPAPIEKTISKAKGQPREPQVYTLPPSRDELTKNQVSLSCAVK | N204S mutations |
| | GFYPSDIAVLWESYGTEWASYKTTPPVLDSDGSFFLVSKLTVTKEEW | |
| | QQGFVFSCSVLHEALHSHYTQKSLSLSPGK | |
| 354 | APEAAGGPSVFLFPPKPKDTLMISRTPEVTCVVVDVSHEDPEVKFNW | Clone CH3C.35.21.17.2 |
| | YVDGVEVHNAKTKPREEQYNSTYRVVSVLTVLHQDWLNGKEYKCK | with hole, LALA, and |
| | VSNKALPAPIEKTISKAKGQPREPQVYTLPPSRDELTKNQVSLSCAVK | M198L and N204S |
| | GFYPSDIAVLWESYGTEWASYKTTPPVLDSDGSFFLVSKLTVTKEEW | mutations |
| | QQGFVFSCSVLHEALHSHYTQKSLSLSPGK | |
| 355 | APEAAGGPSVFLFPPKPKDTLMISRTPEVTCVVVDVSHEDPEVKFNW | Clone CH3C.35.21.17.2 |
| | YVDGVEVHNAKTKPREEQYNSTYRVVSVLTVLHQDWLNGKEYKCK | with hole, LALAPG, and |
| | VSNKALGAPIEKTISKAKGQPREPQVYTLPPSRDELTKNQVSLSCAVK | M198L and N204S |
| | GFYPSDIAVLWESYGTEWASYKTTPPVLDSDGSFFLVSKLTVTKEEW | mutations |
| | QQGFVFSCSVLHEALHSHYTQKSLSLSPGK | |
| 356 | APELLGGPSVFLFPPKPKDTLMISRTPEVTCVVVDVSHEDPEVKFNW | Clone CH3C.35.23 with |
| | YVDGVEVHNAKTKPREEQYNSTYRVVSVLTVLHQDWLNGKEYKCK | M198L and N204S |
| | VSNKALPAPIEKTISKAKGQPREPQVYTLPPSRDELTKNQVSLTCLVK | mutations |
| | GFYPSDIAVEWESYGTEWSNYKTTPPVLDSDGSFFLYSKLTVTKEEW | |
| | QQGFVFSCSVLHEALHSHYTQKSLSLSPGK | |
| 357 | APELLGGPSVFLFPPKPKDTLMISRTPEVTCVVVDVSHEDPEVKFNW | Clone CH3C.35.23 with |
| | YVDGVEVHNAKTKPREEQYNSTYRVVSVLTVLHQDWLNGKEYKCK | knob and M198L and |
| | VSNKALPAPIEKTISKAKGQPREPQVYTLPPSRDELTKNQVSLWCLVK | N204S mutations |
| | GFYPSDIAVEWESYGTEWSNYKTTPPVLDSDGSFFLYSKLTVTKEEW | |
| | QQGFVFSCSVLHEALHSHYTQKSLSLSPGK | |
| 358 | APEAAGGPSVFLFPPKPKDTLMISRTPEVTCVVVDVSHEDPEVKFNW | Clone CH3C.35.23 with |
| | YVDGVEVHNAKTKPREEQYNSTYRVVSVLTVLHQDWLNGKEYKCK | knob, LALA, and M198L |
| | VSNKALPAPIEKTISKAKGQPREPQVYTLPPSRDELTKNQVSLWCLVK | and N204S mutations |
| | GFYPSDIAVEWESYGTEWSNYKTTPPVLDSDGSFFLYSKLTVTKEEW | |
| | QQGFVFSCSVLHEALHSHYTQKSLSLSPGK | |
| 359 | APEAAGGPSVFLFPPKPKDTLMISRTPEVTCVVVDVSHEDPEVKFNW | Clone CH3C.35.23 with |
| | YVDGVEVHNAKTKPREEQYNSTYRVVSVLTVLHQDWLNGKEYKCK | knob, LALAPG, and |
| | VSNKALGAPIEKTISKAKGQPREPQVYTLPPSRDELTKNQVSLWCLV | M198L and N204S |
| | KGFYPSDIAVEWESYGTEWSNYKTTPPVLDSDGSFFLYSKLTVTKEE | mutations |
| | WQQGFVFSCSVLHEALHSHYTQKSLSLSPGK | |
| 360 | APELLGGPSVFLFPPKPKDTLMISRTPEVTCVVVDVSHEDPEVKFNW | Clone CH3C.35.23 with |
| | YVDGVEVHNAKTKPREEQYNSTYRVVSVLTVLHQDWLNGKEYKCK | hole and M198L and |
| | VSNKALPAPIEKTISKAKGQPREPQVYTLPPSRDELTKNQVSLSCAVK | N204S mutations |
| | GFYPSDIAVEWESYGTEWSNYKTTPPVLDSDGSFFLVSKLTVTKEEW | |
| | QQGFVFSCSVLHEALHSHYTQKSLSLSPGK | |
| 361 | APEAAGGPSVFLFPPKPKDTLMISRTPEVTCVVVDVSHEDPEVKFNW | Clone CH3C.35.23 with |
| | YVDGVEVHNAKTKPREEQYNSTYRVVSVLTVLHQDWLNGKEYKCK | hole, LALA, and M198L |
| | VSNKALPAPIEKTISKAKGQPREPQVYTLPPSRDELTKNQVSLSCAVK | and N204S mutations |
| | GFYPSDIAVEWESYGTEWSNYKTTPPVLDSDGSFFLVSKLTVTKEEW | |
| | QQGFVFSCSVLHEALHSHYTQKSLSLSPGK | |
| 362 | APEAAGGPSVFLFPPKPKDTLMISRTPEVTCVVVDVSHEDPEVKFNW | Clone CH3C.35.23 with |
| | YVDGVEVHNAKTKPREEQYNSTYRVVSVLTVLHQDWLNGKEYKCK | hole, LALAPG, and |
| | VSNKALGAPIEKTISKAKGQPREPQVYTLPPSRDELTKNQVSLSCAVK | M198L and N204S |
| | GFYPSDIAVEWESYGTEWSNYKTTPPVLDSDGSFFLVSKLTVTKEEW | mutations |
| | QQGFVFSCSVLHEALHSHYTQKSLSLSPGK | |
| 363 | APELLGGPSVFLFPPKPKDTLMISRTPEVTCVVVDVSHEDPEVKFNW | Clone CH3C.35.21 with |
| | YVDGVEVHNAKTKPREEQYNSTYRVVSVLTVLHQDWLNGKEYKCK | M198L and N204S |
| | VSNKALPAPIEKTISKAKGQPREPQVYTLPPSRDELTKNQVSLTCLVK | mutations |
| | GFYPSDIAVWWESYGTEWSSYKTTPPVLDSDGSFFLYSKLTVTKEEW | |
| | QQGFVFSCSVLHEALHSHYTQKSLSLSPGK | |
| 364 | APELLGGPSVFLFPPKPKDTLMISRTPEVTCVVVDVSHEDPEVKFNW | Clone CH3C.35.21 with |
| | YVDGVEVHNAKTKPREEQYNSTYRVVSVLTVLHQDWLNGKEYKCK | knob and M198L and |
| | VSNKALPAPIEKTISKAKGQPREPQVYTLPPSRDELTKNQVSLWCLVK | N204S mutations |
| | GFYPSDIAVWWESYGTEWSSYKTTPPVLDSDGSFFLYSKLTVTKEEW | |
| | QQGFVFSCSVLHEALHSHYTQKSLSLSPGK | |
| 365 | APEAAGGPSVFLFPPKPKDTLMISRTPEVTCVVVDVSHEDPEVKFNW | Clone CH3C.35.21 with |
| | YVDGVEVHNAKTKPREEQYNSTYRVVSVLTVLHQDWLNGKEYKCK | knob, LALA, and M198L |
| | VSNKALPAPIEKTISKAKGQPREPQVYTLPPSRDELTKNQVSLWCLVK | and N204S mutations |
| | GFYPSDIAVWWESYGTEWSSYKTTPPVLDSDGSFFLYSKLTVTKEEW | |
| | QQGFVFSCSVLHEALHSHYTQKSLSLSPGK | |
| 366 | APEAAGGPSVFLFPPKPKDTLMISRTPEVTCVVVDVSHEDPEVKFNW | Clone CH3C.35.21 with |
| | YVDGVEVHNAKTKPREEQYNSTYRVVSVLTVLHQDWLNGKEYKCK | knob, LALAPG, and |
| | VSNKALGAPIEKTISKAKGQPREPQVYTLPPSRDELTKNQVSLWCLV | M198L and N204S |
| | KGFYPSDIAVWWESYGTEWSSYKTTPPVLDSDGSFFLYSKLTVTKEE | mutations |
| | WQQGFVFSCSVLHEALHSHYTQKSLSLSPGK | |
| 367 | APELLGGPSVFLFPPKPKDTLMISRTPEVTCVVVDVSHEDPEVKFNW | Clone CH3C.35.21 with |
| | YVDGVEVHNAKTKPREEQYNSTYRVVSVLTVLHQDWLNGKEYKCK | hole and M198L and |
| | VSNKALPAPIEKTISKAKGQPREPQVYTLPPSRDELTKNQVSLSCAVK | N204S mutations |
| | GFYPSDIAVWWESYGTEWSSYKTTPPVLDSDGSFFLVSKLTVTKEEW | |
| | QQGFVFSCSVLHEALHSHYTQKSLSLSPGK | |
| 368 | APEAAGGPSVFLFPPKPKDTLMISRTPEVTCVVVDVSHEDPEVKFNW | Clone CH3C.35.21 with |
| | YVDGVEVHNAKTKPREEQYNSTYRVVSVLTVLHQDWLNGKEYKCK | hole, LALA, and M198L |
| | VSNKALPAPIEKTISKAKGQPREPQVYTLPPSRDELTKNQVSLSCAVK | and N204S mutations |
| | GFYPSDIAVWWESYGTEWSSYKTTPPVLDSDGSFFLVSKLTVTKEEW | |
| | QQGFVFSCSVLHEALHSHYTQKSLSLSPGK | |
| 369 | APEAAGGPSVFLFPPKPKDTLMISRTPEVTCVVVDVSHEDPEVKFNW | Clone CH3C.35.21 with |
| | YVDGVEVHNAKTKPREEQYNSTYRVVSVLTVLHQDWLNGKEYKCK | hole, LALAPG, and |
| | VSNKALGAPIEKTISKAKGQPREPQVYTLPPSRDELTKNQVSLSCAVK | M198L and N204S |
| | GFYPSDIAVWWESYGTEWSSYKTTPPVLDSDGSFFLVSKLTVTKEEW | mutations |
| | QQGFVFSCSVLHEALHSHYTQKSLSLSPGK | |
| 370 | APELLGGPSVFLFPPKPKDTLMISRTPEVTCVVVDVSHEDPEVKFNW | Clone CH3C.35.20.1.1 |
| | YVDGVEVHNAKTKPREEQYNSTYRVVSVLTVLHQDWLNGKEYKCK | with M198L and N204S |
| | VSNKALPAPIEKTISKAKGQPREPQVYTLPPSRDELTKNQVSLTCLVK | mutations |
| | GFYPSDIAVEWESFGTEWSSYKTTPPVLDSDGSFFLYSKLTVSKEEW | |
| | QQGFVFSCSVLHEALHSHYTQKSLSLSPGK | |
| 371 | APELLGGPSVFLFPPKPKDTLMISRTPEVTCVVVDVSHEDPEVKFNW | Clone CH3C.35.20.1.1 |
| | YVDGVEVHNAKTKPREEQYNSTYRVVSVLTVLHQDWLNGKEYKCK | with knob and M198L and |
| | VSNKALPAPIEKTISKAKGQPREPQVYTLPPSRDELTKNQVSLWCLVK | N204S mutations |
| | GFYPSDIAVEWESFGTEWSSYKTTPPVLDSDGSFFLYSKLTVSKEEW | |
| | QQGFVFSCSVLHEALHSHYTQKSLSLSPGK | |
| 372 | APEAAGGPSVFLFPPKPKDTLMISRTPEVTCVVVDVSHEDPEVKFNW | Clone CH3C.35.20.1.1 |
| | YVDGVEVHNAKTKPREEQYNSTYRVVSVLTVLHQDWLNGKEYKCK | with knob, LALA, and |
| | VSNKALPAPIEKTISKAKGQPREPQVYTLPPSRDELTKNQVSLWCLVK | M198L and N204S |
| | GFYPSDIAVEWESFGTEWSSYKTTPPVLDSDGSFFLYSKLTVSKEEW | mutations |
| | QQGFVFSCSVLHEALHSHYTQKSLSLSPGK | |
| 373 | APEAAGGPSVFLFPPKPKDTLMISRTPEVTCVVVDVSHEDPEVKFNW | Clone CH3C.35.20.1.1 |
| | YVDGVEVHNAKTKPREEQYNSTYRVVSVLTVLHQDWLNGKEYKCK | with knob, LALAPG, and |
| | VSNKALGAPIEKTISKAKGQPREPQVYTLPPSRDELTKNQVSLWCLV | M198L and N204S |
| | KGFYPSDIAVEWESFGtEWSSYKTTPPVLDSDGSFFLYSKLTVSKEE | mutations |
| | WQQGFVFSCSVLHEALHSHYTQKSLSLSPGK | |
| 374 | APELLGGPSVFLFPPKPKDTLMISRTPEVTCVVVDVSHEDPEVKFNW | Clone CH3C.35.20.1.1 |
| | YVDGVEVHNAKTKPREEQYNSTYRVVSVLTVLHQDWLNGKEYKCK | with hole and M198L and |
| | VSNKALPAPIEKTISKAKGQPREPQVYTLPPSRDELTKNQVSLSCAVK | N204S mutations |
| | GFYPSDIAVEWESFGTEWSSYKTTPPVLDSDGSFFLVSKLTVSKEEW | |
| | QQGFVFSCSVLHEALHSHYTQKSLSLSPGK | |
| 375 | APEAAGGPSVFLFPPKPKDTLMISRTPEVTCVVVDVSHEDPEVKFNW | Clone CH3C.35.20.1.1 |
| | YVDGVEVHNAKTKPREEQYNSTYRVVSVLTVLHQDWLNGKEYKCK | with hole, LALA, and |
| | VSNKALPAPIEKTISKAKGQPREPQVYTLPPSRDELTKNQVSLSCAVK | M198L and N204S |
| | GFYPSDIAVEWESFGTEWSSYKTTPPVLDSDGSFFLVSKLTVSKEEW | mutations |
| | QQGFVFSCSVLHEALHSHYTQKSLSLSPGK | |
| 376 | APEAAGGPSVFLFPPKPKDTLMISRTPEVTCVVVDVSHEDPEVKFNW | Clone CH3C.35.20.1.1 |
| | YVDGVEVHNAKTKPREEQYNSTYRVVSVLTVLHQDWLNGKEYKCK | with hole, LALAPG, and |
| | VSNKALGAPIEKTISKAKGQPREPQVYTLPPSRDELTKNQVSLSCAVK | M198L and N204S |
| | GFYPSDIAVEWESFGTEWSSYKTTPPVLDSDGSFFLVSKLTVSKEEW | mutations |
| | QQGFVFSCSVLHEALHSHYTQKSLSLSPGK | |
| 377 | APELLGGPSVFLFPPKPKDTLMISRTPEVTCVVVDVSHEDPEVKFNW | Clone CH3C.35.23.2.1 |
| | YVDGVEVHNAKTKPREEQYNSTYRVVSVLTVLHQDWLNGKEYKCK | with M198L and N204S |
| | VSNKALPAPIEKTISKAKGQPREPQVYTLPPSRDELTKNQVSLTCLVK | mutations |
| | GFYPSDIAVEWESYGTEWANYKTTPPVLDSDGSFFLYSKLTVSKSEW | |
| | QQGFVFSCSVLHEALHSHYTQKSLSLSPGK | |
| 378 | APELLGGPSVFLFPPKPKDTLMISRTPEVTCVVVDVSHEDPEVKFNW | Clone CH3C.35.23.2.1 |
| | YVDGVEVHNAKTKPREEQYNSTYRVVSVLTVLHQDWLNGKEYKCK | with knob and M198L and |
| | VSNKALPAPIEKTISKAKGQPREPQVYTLPPSRDELTKNQVSLWCLVK | N204S mutations |
| | GFYPSDIAVEWESYGTEWANYKTTPPVLDSDGSFFLYSKLTVSKSEW | |
| | QQGFVFSCSVLHEALHSHYTQKSLSLSPGK | |
| 379 | APEAAGGPSVFLFPPKPKDTLMISRTPEVTCVVVDVSHEDPEVKFNW | Clone CH3C.35.23.2.1 |
| | YVDGVEVHNAKTKPREEQYNSTYRVVSVLTVLHQDWLNGKEYKCK | with knob, LALA, and |
| | VSNKALPAPIEKTISKAKGQPREPQVYTLPPSRDELTKNQVSLWCLVK | M198L and N204S |
| | GFYPSDIAVEWESYGTEWANYKTTPPVLDSDGSFFLYSKLTVSKSEW | mutations |
| | QQGFVFSCSVLHEALHSHYTQKSLSLSPGK | |
| 380 | APEAAGGPSVFLFPPKPKDTLMISRTPEVTCVVVDVSHEDPEVKFNW | Clone CH3C.35.23.2.1 |
| | YVDGVEVHNAKTKPREEQYNSTYRVVSVLTVLHQDWLNGKEYKCK | with knob, LALAPG, and |
| | VSNKALGAPIEKTISKAKGQPREPQVYTLPPSRDELTKNQVSLWCLV | M198L and N204S |
| | KGFYPSDIAVEWESYGTEWANYKTTPPVLDSDGSFFLYSKLTVSKSE | mutations |
| | WQQGFVFSCSVLHEALHSHYTQKSLSLSPGK | |
| 381 | APELLGGPSVFLFPPKPKDTLMISRTPEVTCVVVDVSHEDPEVKFNW | Clone CH3C.35.23.2.1 |
| | YVDGVEVHNAKTKPREEQYNSTYRVVSVLTVLHQDWLNGKEYKCK | with hole and M198L and |
| | VSNKALPAPIEKTISKAKGQPREPQVYTLPPSRDELTKNQVSLSCAVK | N204S mutations |
| | GFYPSDIAVEWESYGTEWANYKTTPPVLDSDGSFFLVSKLTVSKSEW | |
| | QQGFVFSCSVLHEALHSHYTQKSLSLSPGK | |
| 382 | APEAAGGPSVFLFPPKPKDTLMISRTPEVTCVVVDVSHEDPEVKFNW | Clone CH3C.35.23.2.1 |
| | YVDGVEVHNAKTKPREEQYNSTYRVVSVLTVLHQDWLNGKEYKCK | with hole, LALA, and |
| | VSNKALPAPIEKTISKAKGQPREPQVYTLPPSRDELTKNQVSLSCAVK | M198L and N204S |
| | GFYPSDIAVEWESYGTEWANYKTTPPVLDSDGSFFLVSKLTVSKSEW | mutations |
| | QQGFVFSCSVLHEALHSHYTQKSLSLSPGK | |
| 383 | APEAAGGPSVFLFPPKPKDTLMISRTPEVTCVVVDVSHEDPEVKFNW | Clone CH3C.35.23.2.1 |
| | YVDGVEVHNAKTKPREEQYNSTYRVVSVLTVLHQDWLNGKEYKCK | with hole, LALAPG, and |
| | VSNKALGAPIEKTISKAKGQPREPQVYTLPPSRDELTKNQVSLSCAVK | M198L and N204S |
| | GFYPSDIAVEWESYGTEWANYKTTPPVLDSDGSFFLVSKLTVSKSEW | mutations |
| | QQGFVFSCSVLHEALHSHYTQKSLSLSPGK | |
| 384 | APELLGGPSVFLFPPKPKDTLMISRTPEVTCVVVDVSHEDPEVKFNW | Clone CH3C.35.23.1.1 |
| | YVDGVEVHNAKTKPREEQYNSTYRVVSVLTVLHQDWLNGKEYKCK | with M198L and N204S |
| | VSNKALPAPIEKTISKAKGQPREPQVYTLPPSRDELTKNQVSLTCLVK | mutations |
| | GFYPSDIAVEWESFGTEWSNYKTTPPVLDSDGSFFLYSKLTVSKEEW | |
| | QQGFVFSCSVLHEALHSHYTQKSLSLSPGK | |
| 385 | APELLGGPSVFLFPPKPKDTLMISRTPEVTCVVVDVSHEDPEVKFNW | Clone CH3C.35.23.1.1 |
| | YVDGVEVHNAKTKPREEQYNSTYRVVSVLTVLHQDWLNGKEYKCK | with knob and M198L and |
| | VSNKALPAPIEKTISKAKGQPREPQVYTLPPSRDELTKNQVSLWCLVK | N204S mutations |
| | GFYPSDIAVEWESFGTEWSNYKTTPPVLDSDGSFFLYSKLTVSKEEW | |
| | QQGFVFSCSVLHEALHSHYTQKSLSLSPGK | |
| 386 | APEAAGGPSVFLFPPKPKDTLMISRTPEVTCVVVDVSHEDPEVKFNW | Clone CH3C.35.23.1.1 |
| | YVDGVEVHNAKTKPREEQYNSTYRVVSVLTVLHQDWLNGKEYKCK | with knob, LALA, and |
| | VSNKALPAPIEKTISKAKGQPREPQVYTLPPSRDELTKNQVSLWCLVK | M198L and N204S |
| | GFYPSDIAVEWESFGTEWSNYKTTPPVLDSDGSFFLYSKLTVSKEEW | mutations |
| | QQGFVFSCSVLHEALHSHYTQKSLSLSPGK | |
| 387 | APEAAGGPSVFLFPPKPKDTLMISRTPEVTCVVVDVSHEDPEVKFNW | Clone CH3C.35.23.1.1 |
| | YVDGVEVHNAKTKPREEQYNSTYRVVSVLTVLHQDWLNGKEYKCK | with knob, LALAPG, and |
| | VSNKALGAPIEKTISKAKGQPREPQVYTLPPSRDELTKNQVSLWCLV | M198L and N204S |
| | KGFYPSDIAVEWESFGTqEWSNYKTTPPVLDSDGSFFLYSKLTVSKEE | mutations |
| | WQQGFVFSCSVLHEALHSHYTQKSLSLSPGK | |
| 388 | APELLGGPSVFLFPPKPKDTLMISRTPEVTCVVVDVSHEDPEVKFNW | Clone CH3C.35.23.1.1 |
| | YVDGVEVHNAKTKPREEQYNSTYRVVSVLTVLHQDWLNGKEYKCK | with hole and M198L and |
| | VSNKALPAPIEKTISKAKGQPREPQVYTLPPSRDELTKNQVSLSCAVK | N204S mutations |
| | GFYPSDIAVEWESFGTEWSNYKTTPPVLDSDGSFFLVSKLTVSKEEW | |
| | QQGFVFSCSVLHEALHSHYTQKSLSLSPGK | |
| 389 | APEAAGGPSVFLFPPKPKDTLMISRTPEVTCVVVDVSHEDPEVKFNW | Clone CH3C.35.23.1.1 |
| | YVDGVEVHNAKTKPREEQYNSTYRVVSVLTVLHQDWLNGKEYKCK | with hole, LALA, and |
| | VSNKALPAPIEKTISKAKGQPREPQVYTLPPSRDELTKNQVSLSCAVK | M198L and N204S |
| | GFYPSDIAVEWESFGTEWSNYKTTPPVLDSDGSFFLVSKLTVSKEEW | mutations |
| | QQGFVFSCSVLHEALHSHYTQKSLSLSPGK | |
| 390 | APEAAGGPSVFLFPPKPKDTLMISRTPEVTCVVVDVSHEDPEVKFNW | Clone CH3C.35.23.1.1 |
| | YVDGVEVHNAKTKPREEQYNSTYRVVSVLTVLHQDWLNGKEYKCK | with hole, LALAPG, and |
| | VSNKALGAPIEKTISKAKGQPREPQVYTLPPSRDELTKNQVSLSCAVK | M198L and N204S |
| | GFYPSDIAVEWESFGTEWSNYKTTPPVLDSDGSFFLVSKLTVSKEEW | mutations |
| | QQGFVFSCSVLHEALHSHYTQKSLSLSPGK | |
| 391 | APELLGGPSVFLFPPKPKDTLMISRTPEVTCVVVDVSHEDPEVKFNW | Fc sequence with knob |
| | YVDGVEVHNAKTKPREEQYNSTYRVVSVLTVLHQDWLNGKEYKCK | mutation |
| | VSNKALPAPIEKTISKAKGQPREPQVYTLPPSRDELTKNQVSLWCLVK | |
| | GFYPSDIAVEWESNGQPENNYKTTPPVLDSDGSFFLYSKLTVDKSRW | |
| | QQGNVFSCSVMHEALHNHYTQKSLSLSPGK | |
| 392 | APEAAGGPSVFLFPPKPKDTLMISRTPEVTCVVVDVSHEDPEVKFNW | Fc sequence with knob and |
| | YVDGVEVHNAKTKPREEQYNSTYRVVSVLTVLHQDWLNGKEYKCK | LALA mutations |
| | VSNKALPAPIEKTISKAKGQPREPQVYTLPPSRDELTKNQVSLWCLVK | |
| | GFYPSDIAVEWESNGQPENNYKTTPPVLDSDGSFFLYSKLTVDKSRW | |
| | QQGNVFSCSVMHEALHNHYTQKSLSLSPGK | |
| 393 | APEAAGGPSVFLFPPKPKDTLMISRTPEVTCVVVDVSHEDPEVKFNW | Fc sequence with knob and |
| | YVDGVEVHNAKTKPREEQYNSTYRVVSVLTVLHQDWLNGKEYKCK | LALAPG mutations |
| | VSNKALGAPIEKTISKAKGQPREPQVYTLPPSRDELTKNQVSLWCLV | |
| | KGFYPSDIAVEWESNGQPENNYKTTPPVLDSDGSFFLYSKLTVDKSR | |
| | WQQGNVFSCSVMHEALHNHYTQKSLSLSPGK | |
| 394 | APELLGGPSVFLFPPKPKDTLYITREPEVTCVVVDVSHEDPEVKFNWY | Fc sequence with knob and |
| | VDGVEVHNAKTKPREEQYNSTYRVVSVLTVLHQDWLNGKEYKCKV | YTE mutations |
| | SNKALPAPIEKTISKAKGQPREPQVYTLPPSRDELTKNQVSLWCLVKG | |
| | FYPSDIAVEWESNGQPENNYKTTPPVLDSDGSFFLYSKLTVDKSRWQ | |
| | QGNVFSCSVMHEALHNHYTQKSLSLSPGK | |
| 395 | APEAAGGPSVFLFPPKPKDTLYITREPEVTCVVVDVSHEDPEVKFNW | Fc sequence with knob, |
| | YVDGVEVHNAKTKPREEQYNSTYRVVSVLTVLHQDWLNGKEYKCK | LALA, and YTE |
| | VSNKALPAPIEKTISKAKGQPREPQVYTLPPSRDELTKNQVSLWCLVK | mutations |
| | GFYPSDIAVEWESNGQPENNYKTTPPVLDSDGSFFLYSKLTVDKSRW | |
| | QQGNVFSCSVMHEALHNHYTQKSLSLSPGK | |
| 396 | APEAAGGPSVFLFPPKPKDTLYITREPEVTCVVVDVSHEDPEVKFNW | Fc sequence with knob, |
| | YVDGVEVHNAKTKPREEQYNSTYRVVSVLTVLHQDWLNGKEYKCK | LALAPG, and YTE |
| | VSNKALGAPIEKTISKAKGQPREPQVYTLPPSRDELTKNQVSLWCLV | mutations |
| | KGFYPSDIAVEWESNGQPENNYKTTPPVLDSDGSFFLYSKLTVDKSR | |
| | WQQGNVFSCSVMHEALHNHYTQKSLSLSPGK | |
| 397 | APELLGGPSVFLFPPKPKDTLMISRTPEVTCVVVDVSHEDPEVKFNW | Fc sequence with hole |
| | YVDGVEVHNAKTKPREEQYNSTYRVVSVLTVLHQDWLNGKEYKCK | mutations |
| | VSNKALPAPIEKTISKAKGQPREPQVYTLPPSRDELTKNQVSLSCAVK | |
| | GFYPSDIAVEWESNGQPENNYKTTPPVLDSDGSFFLVSKLTVDKSRW | |
| | QQGNVFSCSVMHEALHNHYTQKSLSLSPGK | |
| 398 | APEAAGGPSVFLFPPKPKDTLMISRTPEVTCVVVDVSHEDPEVKFNW | Fc sequence with hole and |
| | YVDGVEVHNAKTKPREEQYNSTYRVVSVLTVLHQDWLNGKEYKCK | LALA mutations |
| | VSNKALPAPIEKTISKAKGQPREPQVYTLPPSRDELTKNQVSLSCAVK | |
| | GFYPSDIAVEWESNGQPENNYKTTPPVLDSDGSFFLVSKLTVDKSRW | |
| | QQGNVFSCSVMHEALHNHYTQKSLSLSPGK | |
| 399 | APEAAGGPSVFLFPPKPKDTLMISRTPEVTCVVVDVSHEDPEVKFNW | Fc sequence with hole and |
| | YVDGVEVHNAKTKPREEQYNSTYRVVSVLTVLHQDWLNGKEYKCK | LALAPG mutations |
| | VSNKALGAPIEKTISKAKGQPREPQVYTLPPSRDELTKNQVSLSCAVK | |
| | GFYPSDIAVEWESNGQPENNYKTTPPVLDSDGSFFLVSKLTVDKSRW | |
| | QQGNVFSCSVMHEALHNHYTQKSLSLSPGK | |
| 400 | APELLGGPSVFLFPPKPKDTLYITREPEVTCVVVDVSHEDPEVKFNWY | Fc sequence with hole and |
| | VDGVEVHNAKTKPREEQYNSTYRVVSVLTVLHQDWLNGKEYKCKV | YTE mutations |
| | SNKALPAPIEKTISKAKGQPREPQVYTLPPSRDELTKNQVSLSCAVKG | |
| | FYPSDIAVEWESNGQPENNYKTTPPVLDSDGSFFLVSKLTVDKSRWQ | |
| | QGNVFSCSVMHEALHNHYTQKSLSLSPGK | |
| 401 | APEAAGGPSVFLFPPKPKDTLYITREPEVTCVVVDVSHEDPEVKFNW | Fc sequence with hole, |
| | YVDGVEVHNAKTKPREEQYNSTYRVVSVLTVLHQDWLNGKEYKCK | LALA, and YTE |
| | VSNKALPAPIEKTISKAKGQPREPQVYTLPPSRDELTKNQVSLSCAVK | mutations |
| | GFYPSDIAVEWESNGQPENNYKTTPPVLDSDGSFFLVSKLTVDKSRW | |
| | QQGNVFSCSVMHEALHNHYTQKSLSLSPGK | |
| 402 | APEAAGGPSVFLFPPKPKDTLYITREPEVTCVVVDVSHEDPEVKFNW | Fc sequence with hole, |
| | YVDGVEVHNAKTKPREEQYNSTYRVVSVLTVLHQDWLNGKEYKCK | LALAPG, and YTE |
| | VSNKALGAPIEKTISKAKGQPREPQVYTLPPSRDELTKNQVSLSCAVK | mutations |
| | GFYPSDIAVEWESNGQPENNYKTTPPVLDSDGSFFLVSKLTVDKSRW | |
| | QQGNVFSCSVMHEALHNHYTQKSLSLSPGK | |
| 403 | APELLGGPSVFLFPPKPKDTLMISRTPEVTCVVVDVSHEDPEVKFNW | Fc sequence with M198L |
| | YVDGVEVHNAKTKPREEQYNSTYRVVSVLTVLHQDWLNGKEYKCK | and N204S mutations |
| | VSNKALPAPIEKTISKAKGQPREPQVYTLPPSRDELTKNQVSLTCLVK | |
| | GFYPSDIAVEWESNGQPENNYKTTPPVLDSDGSFFLYSKLTVDKSRW | |
| | QQGNVFSCSVLHEALHSHYTQKSLSLSPGK | |
| 404 | APELLGGPSVFLFPPKPKDTLMISRTPEVTCVVVDVSHEDPEVKFNW | Fc sequence with knob and |
| | YVDGVEVHNAKTKPREEQYNSTYRVVSVLTVLHQDWLNGKEYKCK | M198L and N204S |
| | VSNKALPAPIEKTISKAKGQPREPQVYTLPPSRDELTKNQVSLWCLVK | mutations |
| | GFYPSDIAVEWESNGQPENNYKTTPPVLDSDGSFFLYSKLTVDKSRW | |
| | QQGNVFSCSVLHEALHSHYTQKSLSLSPGK | |
| 405 | APEAAGGPSVFLFPPKPKDTLMISRTPEVTCVVVDVSHEDPEVKFNW | Fc sequence with knob, |
| | YVDGVEVHNAKTKPREEQYNSTYRVVSVLTVLHQDWLNGKEYKCK | LALA, and M198L and |
| | VSNKALPAPIEKTISKAKGQPREPQVYTLPPSRDELTKNQVSLWCLVK | N204S mutations |
| | GFYPSDIAVEWESNGQPENNYKTTPPVLDSDGSFFLYSKLTVDKSRW | |
| | QQGNVFSCSVLHEALHSHYTQKSLSLSPGK | |
| 406 | APEAAGGPSVFLFPPKPKDTLMISRTPEVTCVVVDVSHEDPEVKFNW | Fc sequence with knob, |
| | YVDGVEVHNAKTKPREEQYNSTYRVVSVLTVLHQDWLNGKEYKCK | LALAPG, and M198L and |
| | VSNKALGAPIEKTISKAKGQPREPQVYTLPPSRDELTKNQVSLWCLV | N204S mutations |
| | KGFYPSDIAVEWESNGQPENNYKTTPPVLDSDGSFFLYSKLTVDKSR | |
| | WQQGNVFSCSVLHEALHSHYTQKSLSLSPGK | |
| 407 | APELLGGPSVFLFPPKPKDTLMISRTPEVTCVVVDVSHEDPEVKFNW | Fc sequence with hole and |
| | YVDGVEVHNAKTKPREEQYNSTYRVVSVLTVLHQDWLNGKEYKCK | M198L and N204S |
| | VSNKALPAPIEKTISKAKGQPREPQVYTLPPSRDELTKNQVSLSCAVK | mutations |
| | GFYPSDIAVEWESNGQPENNYKTTPPVLDSDGSFFLVSKLTVDKSRW | |
| | QQGNVFSCSVLHEALHSHYTQKSLSLSPGK | |
| 408 | APEAAGGPSVFLFPPKPKDTLMISRTPEVTCVVVDVSHEDPEVKFNW | Fc sequence with hole, |
| | YVDGVEVHNAKTKPREEQYNSTYRVVSVLTVLHQDWLNGKEYKCK | LALA, and M198L and |
| | VSNKALPAPIEKTISKAKGQPREPQVYTLPPSRDELTKNQVSLSCAVK | N204S mutations |
| | GFYPSDIAVEWESNGQPENNYKTTPPVLDSDGSFFLVSKLTVDKSRW | |
| | QQGNVFSCSVLHEALHSHYTQKSLSLSPGK | |
| 409 | APEAAGGPSVFLFPPKPKDTLMISRTPEVTCVVVDVSHEDPEVKFNW | Fc sequence with hole, |
| | YVDGVEVHNAKTKPREEQYNSTYRVVSVLTVLHQDWLNGKEYKCK | LALAPG, and M198L and |
| | VSNKALGAPIEKTISKAKGQPREPQVYTLPPSRDELTKNQVSLSCAVK | N204S mutations |
| | GFYPSDIAVEWESNGQPENNYKTTPPVLDSDGSFFLVSKLTVDKSRW | |
| | QQGNVFSCSVLHEALHSHYTQKSLSLSPGK | |
| 410 | QVQLQQPGAELVKPGASVKMSCKASGYTFTSYNMHWVKQTPGRGL | Heavy chain for anti- |
| | EWIGAIYPGNGDTSYNQKFKGKATLTADKSSSTAYMQLSSLTSEDSA | hCD20-3C.35.23 with |
| | VYYCARSTYYGGDWYFNVWGAGTTVTVSAASTKGPSVFPLAPSSKS | knob mutations |
| | TSGGTAALGCLVKDYFPEPVTVSWNSGALTSGVHTFPAVLQSSGLYS | |
| | LSSVVTVPSSSLGTQTYICNVNHKPSNTKVDKKVEPKSCDKTHTCPPC | |
| | PAPELLGGPSVFLFPPKPKDTLMISRTPEVTCVVVDVSHEDPEVKFNW | |
| | YVDGVEVHNAKTKPREEQYNSTYRVVSVLTVLHQDWLNGKEYKCK | |
| | VSNKALPAPIEKTISKAKGQPREPQVYTLPPSRDELTKNQVSLWCLVK | |
| | GFYPSDIAVEWESYGTEWSNYKTTPPVLDSDGSFFLYSKLTVTKEEW | |
| | QQGFVFSCSVMHEALHNHYTQKSLSLSPGK | |
| 411 | QVQLQQPGAELVKPGASVKMSCKASGYTFTSYNMHWVKQTPGRGL | Heavy chain for anti- |
| | EWIGAIYPGNGDTSYNQKFKGKATLTADKSSSTAYMQLSSLTSEDSA | hCD20-3C.35.23 with |
| | VYYCARSTYYGGDWYFNVWGAGTTVTVSAASTKGPSVFPLAPSSKS | knob and LALA mutations |
| | TSGGTAALGCLVKDYFPEPVTVSWNSGALTSGVHTFPAVLQSSGLYS | |
| | LSSVVTVPSSSLGTQTYICNVNHKPSNTKVDKKVEPKSCDKTHTCPPC | |
| | PAPEAAGGPSVFLFPPKPKDTLMISRTPEVTCVVVDVSHEDPEVKFN | |
| | WYVDGVEVHNAKTKPREEQYNSTYRVVSVLTVLHQDWLNGKEYK | |
| | CKVSNKALPAPIEKTISKAKGQPREPQVYTLPPSRDELTKNQVSLWCL | |
| | VKGFYPSDIAVEWESYGTEWSNYKTTPPVLDSDGSFFLYSKLTVTKE | |
| | EWQQGFVFSCSVMHEALHNHYTQKSLSLSPGK | |
| 412 | QVQLQQPGAELVRPGTSVKLSCKASGYTFTSYWMHWIKQRPGQGLE | Heavy chain for anti- |
| | WIGVIDPSDNYTKYNQKFKGKATLTVDTSSSTAYMQLSSLTSEDSAV | mCD20-3C.35.23 with |
| | YFCAREGYYGSSPWFAYWGQGTLVTVSSASTKGPSVFPLAPSSKSTS | knob mutations |
| | GGTAALGCLVKDYFPEPVTVSWNSGALTSGVHTFPAVLQSSGLYSLS | |
| | SVVTVPSSSLGTQTYICNVNHKPSNTKVDKKVEPKSCDKTHTCPPCP | |
| | APELLGGPSVFLFPPKPKDTLMISRTPEVTCVVVDVSHEDPEVKFNW | |
| | YVDGVEVHNAKTKPREEQYNSTYRVVSVLTVLHQDWLNGKEYKCK | |
| | VSNKALPAPIEKTISKAKGQPREPQVYTLPPSRDELTKNQVSLWCLVK | |
| | GFYPSDIAVEWESYGTEWSNYKTTPPVLDSDGSFFLYSKLTVTKEEW | |
| | QQGFVFSCSVMHEALHNHYTQKSLSLSPGK | |
| 413 | QVQLQQPGAELVRPGTSVKLSCKASGYTFTSYWMHWIKQRPGQGLE | Heavy chain for anti- |
| | WIGVIDPSDNYTKYNQKFKGKATLTVDTSSSTAYMQLSSLTSEDSAV | mCD20-3C.35.23 with |
| | YFCAREGYYGSSPWFAYWGQGTLVTVSSASTKGPSVFPLAPSSKSTS | knob and LALA mutations |
| | GGTAALGCLVKDYFPEPVTVSWNSGALTSGVHTFPAVLQSSGLYSLS | |
| | SVVTVPSSSLGTQTYICNVNHKPSNTKVDKKVEPKSCDKTHTCPPCP | |
| | APEAAGGPSVFLFPPKPKDTLMISRTPEVTCVVVDVSHEDPEVKFNW | |
| | YVDGVEVHNAKTKPREEQYNSTYRVVSVLTVLHQDWLNGKEYKCK | |
| | VSNKALPAPIEKTISKAKGQPREPQVYTLPPSRDELTKNQVSLWCLVK | |
| | GFYPSDIAVEWESYGTEWSNYKTTPPVLDSDGSFFLYSKLTVTKEEW | |
| | QQGFVFSCSVMHEALHNHYTQKSLSLSPGK | |
| 414 | YxtEWSS | Consensus motif for |
| | | CH3C.35 |
| 415 | TxxExxxxF | Consensus motif for |
| | | CH3C.35 |
| 416 | QVQLVESGGGVVQPGRSLRLSCAASGFAFSSYGMHWVRQAPGKGLE | Heavy chain for anti-Aβ- |
| | WVAVIWFDGTKKYYTDSVKGRFTISRDNSKNTLYLQMNTLRAEDTA | Fc polypeptide |
| | VYYCARDRGIGARRGPYYMDVWGKGTTVTVSSASTKGPSVFPLAPS | |
| | SKSTSGGTAALGCLVKDYFPEPVTVSWNSGALTSGVHTFPAVLQSSG | |
| | LYSLSSVVTVPSSSLGTQTYICNVNHKPSNTKVDKKVEPKSCDKTHT | |
| | CPPCPAPELLGGPSVFLFPPKPKDTLMISRTPEVTCVVVDVSHEDPEV | |
| | KFNWYVDGVEVHNAKTKPREEQYNSTYRVVSVLTVLHQDWLNGKE | |
| | YKCKVSNKALPAPIEKTISKAKGQPREPQVYTLPPSRDELTKNQVSLT | |
| | CLVKGFYPSDIAVEWESNGQPENNYKTTPPVLDSDGSFFLYSKLTVD | |
| | KSRWQQGNVFSCSVMHEALHNHYTQKSLSLSPGK | |
| 417 | QVQLVESGGGVVQPGRSLRLSCAASGFAFSSYGMHWVRQAPGKGLE | Heavy chain for anti-Aβ- |
| | WVAVIWFDGTKKYYTDSVKGRFTISRDNSKNTLYLQMNTLRAEDTA | 3C.35.23.4 with knob and |
| | VYYCARDRGIGARRGPYYMDVWGKGTTVTVSSASTKGPSVFPLAPS | LALA mutations |
| | SKSTSGGTAALGCLVKDYFPEPVTVSWNSGALTSGVHTFPAVLQSSG | |
| | LYSLSSVVTVPSSSLGTQTYICNVNHKPSNTKVDKKVEPKSCDKTHT | |
| | CPPCPAPEAAGGPSVFLFPPKPKDTLMISRTPEVTCVVVDVSHEDPEV | |
| | KFNWYVDGVEVHNAKTKPREEQYNSTYRVVSVLTVLHQDWLNGKE | |
| | YKCKVSNKALPAPIEKTISKAKGQPREPQVYTLPPSRDELTKNQVSL | |
| | WCLVKGFYPSDIAVEWESYGTEWSNYKTTPPVLDSDGSFFLYSKLTV | |
| | SKEEWQQGFVFSCSVMHEALHNHYTQKSLSLSPGK | |
| 418 | QVQLVESGGGVVQPGRSLRLSCAASGFAFSSYGMHWVRQAPGKGLE | Heavy chain for anti-Aβ- |
| | WVAVIWFDGTKKYYTDSVKGRFTISRDNSKNTLYLQMNTLRAEDTA | Fc with hole and LALA |
| | VYYCARDRGIGARRGPYYMDVWGKGTTVTVSSASTKGPSVFPLAPS | mutations |
| | SKSTSGGTAALGCLVKDYFPEPVTVSWNSGALTSGVHTFPAVLQSSG | |
| | LYSLSSVVTVPSSSLGTQTYICNVNHKPSNTKVDKKVEPKSCDKTHT | |
| | CPPCPAPEAAGGPSVFLFPPKPKDTLMISRTPEVTCVVVDVSHEDPEV | |
| | KFNWYVDGVEVHNAKTKPREEQYNSTYRVVSVLTVLHQDWLNGKE | |
| | YKCKVSNKALPAPIEKTISKAKGQPREPQVYTLPPSRDELTKNQVSLS | |
| | CAVKGFYPSDIAVEWESNGQPENNYKTTPPVLDSDGSFFLVSKLTVD | |
| | KSRWQQGNVFSCSVMHEALHNHYTQKSLSLSPGK | |
| 419 | QVQLVESGGGVVQPGRSLRLSCAASGFAFSSYGMHWVRQAPGKGLE | Heavy chain for anti-Aβ- |
| | WVAVIWFDGTKKYYTDSVKGRFTISRDNSKNTLYLQMNTLRAEDTA | Fc with hole mutations |
| | VYYCARDRGIGARRGPYYMDVWGKGTTVTVSSASTKGPSVFPLAPS | |
| | SKSTSGGTAALGCLVKDYFPEPVTVSWNSGALTSGVHTFPAVLQSSG | |
| | LYSLSSVVTVPSSSLGTQTYICNVNHKPSNTKVDKKVEPKSCDKTHT | |
| | CPPCPAPELLGGPSVFLFPPKPKDTLMISRTPEVTCVVVDVSHEDPEV | |
| | KFNWYVDGVEVHNAKTKPREEQYNSTYRVVSVLTVLHQDWLNGKE | |
| | YKCKVSNKALPAPIEKTISKAKGQPREPQVYTLPPSRDELTKNQVSLS | |
| | CAVKGFYPSDIAVEWESNGQPENNYKTTPPVLDSDGSFFLVSKLTVD | |
| | KSRWQQGNVFSCSVMHEALHNHYTQKSLSLSPGK | |
| 420 | DIQMTQSPSSLSASVGDRVTITCRASQSISSYLNWYQQKPGKAPKLLI | Light chain for anti-Aβ |
| | YAASSLQSGVPSRFSGSGSGTDFTLTISSLQPEDFATYYCQQSYSTPLT | fusion |
| | FGGGTKVEIKRTVAAPSVFIFPPSDEQLKSGTASVVCLLNNFYPREAK | |
| | VQWKVDNALQSGNSQESVTEQDSKDSTYSLSSTLTLSKADYEKHKV | |
| | YACEVTHQGLSSPVTKSFNRGEC | |
| 421 | HHHHHH | 6XHis tag |

The application's sequence listing, which the Patent Office published only in electronic form, follows.

SEQUENCE LISTING (421 sequences)

SEQ ID NO: 1 - protein, 217 aa, Homo sapiens
APELLGGPSVFLFPPKPKDTLMISRTPEVTCVVVDVSHEDPEVKFNWYVDGVEVHNAKTKPREEQYNSTYRVVSVLTVLHQDWLNGKEYKCKVSNKALPAPIEKTISKAKGQPREPQVYTLPPSRDELTKNQVSLTCLVKGFYPSDIAVEWESNGQPENNYKTTPPVLDSDGSFFLYSKLTVDKSRWQQGNVFSCSVMHEALHNHYTQKSLSLSPGK

SEQ ID NO: 2 - protein, 110 aa, Artificial Sequence
  source: /note="Description of Artificial Sequence: Synthetic polypeptide"
APELLGGPSVFLFPPKPKDTLMISRTPEVTCVVVDVSHEDPEVKFNWYVDGVEVHNAKTKPREEQYNSTYRVVSVLTVLHQDWLNGKEYKCKVSNKALPAPIEKTISKAK

SEQ ID NO: 3 - protein, 107 aa, Artificial Sequence
  source: /note="Description of Artificial Sequence: Synthetic polypeptide"
GQPREPQVYTLPPSRDELTKNQVSLTCLVKGFYPSDIAVEWESNGQPENNYKTTPPVLDSDGSFFLYSKLTVDKSRWQQGNVFSCSVMHEALHNHYTQKSLSLSPGK

SEQ ID NO: 4 - protein, 217 aa, Artificial Sequence
  source: /note="Description of Artificial Sequence: Synthetic polypeptide"
APELLGGPSVFLFPPKPKDTLMISRTPEVTCVVVDVSHEDPEVKFNWYVDGVEVHNAKTKPREEQYNSTYRVVSVLTVLHQDWLNGKEYKCKVSNKALPAPIEKTISKAKGQPREPQVYTLPPSRDELTKNQVSLTCLVKGFYPSDIAVEWESLGLVWVGYKTTPPVLDSDGSFFLYSKLTVAKSTWQQGWVFSCSVMHEALHNHYTQKSLSLSPGK

SEQ ID NO: 5 - protein, 217 aa, Artificial Sequence
  source: /note="Description of Artificial Sequence: Synthetic polypeptide"
APELLGGPSVFLFPPKPKDTLMISRTPEVTCVVVDVSHEDPEVKFNWYVDGVEVHNAKTKPREEQYNSTYRVVSVLTVLHQDWLNGKEYKCKVSNKALPAPIEKTISKAKGQPREPQVYTLPPSRDELTKNQVSLTCLVKGFYPSDIAVEWESYGTVWSHYKTTPPVLDSDGSFFLYSKLTVSKSEWQQGYVFSCSVMHEALHNHYTQKSLSLSPGK

SEQ ID NO: 6 - protein, 217 aa, Artificial Sequence
  source: /note="Description of Artificial Sequence: Synthetic polypeptide"
APELLGGPSVFLFPPKPKDTLMISRTPEVTCVVVDVSHEDPEVKFNWYVDGVEVHNAKTKPREEQYNSTYRVVSVLTVLHQDWLNGKEYKCKVSNKALPAPIEKTISKAKGQPREPQVYTLPPSRDELTKNQVSLTCLVKGFYPSDIAVEWESYGTEWSQYKTTPPVLDSDGSFFLYSKLTVEKSDWQQGHVFSCSVMHEALHNHYTQKSLSLSPGK

SEQ ID NO: 7 - protein, 217 aa, Artificial Sequence
  source: /note="Description of Artificial Sequence: Synthetic polypeptide"
APELLGGPSVFLFPPKPKDTLMISRTPEVTCVVVDVSHEDPEVKFNWYVDGVEVHNAKTKPREEQYNSTYRVVSVLTVLHQDWLNGKEYKCKVSNKALPAPIEKTISKAKGQPREPQVYTLPPSRDELTKNQVSLTCLVKGFYPSDIAVEWESVGTPWALYKTTPPVLDSDGSFFLYSKLTVLKSEWQQGWVFSCSVMHEALHNHYTQKSLSLSPGK

SEQ ID NO: 8 - protein, 217 aa, Artificial Sequence
  source: /note="Description of Artificial Sequence: Synthetic polypeptide"
APELLGGPSVFLFPPKPKDTLMISRTPEVTCVVVDVSHEDPEVKFNWYVDGVEVHNAKTKPREEQYNSTYRVVSVLTVLHQDWLNGKEYKCKVSNKALPAPIEKTISKAKGQPREPQVYTLPPSRDELTKNQVSLTCLVKGFYPSDIAVEWESYGTVWSKYKTTPPVLDSDGSFFLYSKLTVSKSEWQQGFVFSCSVMHEALHNHYTQKSLSLSPGK

SEQ ID NO: 9 - protein, 217 aa, Artificial Sequence
  source: /note="Description of Artificial Sequence: Synthetic polypeptide"
APELLGGPSVFLFPPKPKDTLMISRTPEVTCVVVDVSHEDPEVKFNWYVDGVEVHNAKTKPREEQYNSTYRVVSVLTVLHQDWLNGKEYKCKVSNKALPAPIEKTISKAKGQPREPQVYTLPPSRDELTKNQVSLTCLVKGFYPSDIAVEWESLGHVWAVYKTTPPVLDSDGSFFLYSKLTVPKSTWQQGWVFSCSVMHEALHNHYTQKSLSLSPGK

SEQ ID NO: 10 - protein, 217 aa, Artificial Sequence
  source: /note="Description of Artificial Sequence: Synthetic polypeptide"
APELLGGPSVFLFPPKPKDTLMISRTPEVTCVVVDVSHEDPEVKFNWYVDGVEVHNAKTKPREEQYNSTYRVVSVLTVLHQDWLNGKEYKCKVSNKALPAPIEKTISKAKGQPREPQVYTLPPSRDELTKNQVSLTCLVKGFYPSDIAVEWESLGLVWVGYKTTPPVLDSDGSFFLYSKLTVPKSTWQQGWVFSCSVMHEALHNHYTQKSLSLSPGK

SEQ ID NO: 11 - protein, 217 aa, Artificial Sequence
  source: /note="Description of Artificial Sequence: Synthetic polypeptide"
APELLGGPSVFLFPPKPKDTLMISRTPEVTCVVVDVSHEDPEVKFNWYVDGVEVHNAKTKPREEQYNSTYRVVSVLTVLHQDWLNGKEYKCKVSNKALPAPIEKTISKAKGQPREPQVYTLPPSRDELTKNQVSLTCLVKGFYPSDIAVEWESMGHVWVGYKTTPPVLDSDGSFFLYSKLTVDKSTWQQGWVFSCSVMHEALHNHYTQKSLSLSPGK

SEQ ID NO: 12 - protein, 217 aa, Artificial Sequence
  source: /note="Description of Artificial Sequence: Synthetic polypeptide"
APELLGGPSVFLFPPKPKDTLMISRTPEVTCVVVDVSHEDPEVKFNWYVDGVEVHNAKTKPREEQYNSTYRVVSVLTVLHQDWLNGKEYKCKVSNKALPAPIEKTISKAKGQPREPQVYTLPPSRDELTKNQVSLTCLVKGFYPSDIAVEWESLGLVWVFSKTTPPVLDSDGSFFLYSKLTVPKSTWQQGWVFSCSVMHEALHNHYTQKSLSLSPGK

SEQ ID NO: 13 - protein, 217 aa, Artificial Sequence
  source: /note="Description of Artificial Sequence: Synthetic polypeptide"
APELLGGPSVFLFPPKPKDTLMISRTPEVTCVVVDVSHEDPEVKFNWYVDGVEVHNAKTKPREEQYNSTYRVVSVLTVLHQDWLNGKEYKCKVSNKALPAPIEKTISKAKGQPREPQVYTLPPSRDELTKNQVSLTCLVKGFYPSDIAVEWESYGTEWSSYKTTPPVLDSDGSFFLYSKLTVTKSEWQQGFVFSCSVMHEALHNHYTQKSLSLSPGK

SEQ ID NO: 14 - protein, 217 aa, Artificial Sequence
  source: /note="Description of Artificial Sequence: Synthetic polypeptide"
APELLGGPSVFLFPPKPKDTLMISRTPEVTCVVVDVSHEDPEVKFNWYVDGVEVHNAKTKPREEQYNSTYRVVSVLTVLHQDWLNGKEYKCKVSNKALPAPIEKTISKAKGQPREPQVYTLPPSRDELTKNQVSLTCLVKGFYPSDIAVEWESYGTEWSNYKTTPPVLDSDGSFFLYSKLTVSKSEWQQGFVFSCSVMHEALHNHYTQKSLSLSPGK

SEQ ID NO: 15 - protein, 217 aa, Artificial Sequence
  source: /note="Description of Artificial Sequence: Synthetic polypeptide"
APELLGGPSVFLFPPKPKDTLMISRTPEVTCVVVDVSHEDPEVKFNWYVDGVEVHNAKTKPREEQYNSTYRVVSVLTVLHQDWLNGKEYKCKVSNKALPAPIEKTISKAKGQPREPQVYTLPPSRDELTKNQVSLTCLVKGFYPSDIAVEWESLGHVWVGYKTTPPVLDSDGSFFLYSKLTVSKSEWQQGWVFSCSVMHEALHNHYTQKSLSLSPGK

SEQ ID NO: 16 - protein, 217 aa, Artificial Sequence
  source: /note="Description of Artificial Sequence: Synthetic polypeptide"
APELLGGPSVFLFPPKPKDTLMISRTPEVTCVVVDVSHEDPEVKFNWYVDGVEVHNAKTKPREEQYNSTYRVVSVLTVLHQDWLNGKEYKCKVSNKALPAPIEKTISKAKGQPREPQVYTLPPSRDELTKNQVSLTCLVKGFYPSDIAVEWESLGHVWVATKTTPPVLDSDGSFFLYSKLTVPKSTWQQGWVFSCSVMHEALHNHYTQKSLSLSPGK

SEQ ID NO: 17 - protein, 217 aa, Artificial Sequence
  source: /note="Description of Artificial Sequence: Synthetic polypeptide"
APELLGGPSVFLFPPKPKDTLMISRTPEVTCVVVDVSHEDPEVKFNWYVDGVEVHNAKTKPREEQYNSTYRVVSVLTVLHQDWLNGKEYKCKVSNKALPAPIEKTISKAKGQPREPQVYTLPPSRDELTKNQVSLTCLVKGFYPSDIAVEWESLGPVWVHTKTTPPVLDSDGSFFLYSKLTVPKSTWQQGWVFSCSVMHEALHNHYTQKSLSLSPGK

SEQ ID NO: 18 - protein, 217 aa, Artificial Sequence
  source: /note="Description of Artificial Sequence: Synthetic polypeptide"
APELLGGPSVFLFPPKPKDTLMISRTPEVTCVVVDVSHEDPEVKFNWYVDGVEVHNAKTKPREEQYNSTYRVVSVLTVLHQDWLNGKEYKCKVSNKALPAPIEKTISKAKGQPREPQVYTLPPSRDELTKNQVSLTCLVKGFYPSDIAVEWESLGHVWVDQKTTPPVLDSDGSFFLYSKLTVPKSTWQQGWVFSCSVMHEALHNHYTQKSLSLSPGK

SEQ ID NO: 19 - protein, 217 aa, Artificial Sequence
  source: /note="Description of Artificial Sequence: Synthetic polypeptide"
APELLGGPSVFLFPPKPKDTLMISRTPEVTCVVVDVSHEDPEVKFNWYVDGVEVHNAKTKPREEQYNSTYRVVSVLTVLHQDWLNGKEYKCKVSNKALPAPIEKTISKAKGQPREPQVYTLPPSRDELTKNQVSLTCLVKGFYPSDIAVEWESLGHVWVNQKTTPPVLDSDGSFFLYSKLTVPKSTWQQGWVFSCSVMHEALHNHYTQKSLSLSPGK

SEQ ID NO: 20 - protein, 217 aa, Artificial Sequence
  source: /note="Description of Artificial Sequence: Synthetic polypeptide"
APELLGGPSVFLFPPKPKDTLMISRTPEVTCVVVDVSHEDPEVKFNWYVDGVEVHNAKTKPREEQYNSTYRVVSVLTVLHQDWLNGKEYKCKVSNKALPAPIEKTISKAKGQPREPQVYTLPPSRDELTKNQVSLTCLVKGFYPSDIAVEWESLGHVWVNFKTTPPVLDSDGSFFLYSKLTVPKSTWQQGWVFSCSVMHEALHNHYTQKSLSLSPGK

SEQ ID NO: 21 - protein, 217 aa, Artificial Sequence
  source: /note="Description of Artificial Sequence: Synthetic polypeptide"
APELLGGPSVFLFPPKPKDTLMISRTPEVTCVVVDVSHEDPEVKFNWYVDGVEVHNAKTKPREEQYNSTYRVVSVLTVLHQDWLNGKEYKCKVSNKALPAPIEKTISKAKGQPREPQVYTLPPSRDELTKNQVSLTCLVKGFYPSDIAVWWESLGHVWAVYKTTPPVLDSDGSFFLYSKLTVPKSTWQQGWVFSCSVMHEALHNHYTQKSLSLSPGK

SEQ ID NO: 22 - protein, 217 aa, Artificial Sequence
  source: /note="Description of Artificial Sequence: Synthetic polypeptide"
APELLGGPSVFLFPPKPKDTLMISRTPEVTCVVVDVSHEDPEVKFNWYVDGVEVHNAKTKPREEQYNSTYRVVSVLTVLHQDWLNGKEYKCKVSNKALPAPIEKTISKAKGQPREPQVYTLPPSRDELTKNQVSLTCLVKGFYPSDIAVEWESLGHVWAVYQTTPPVLDSDGSFFLYSKLTVPKSTWQQGWVFSCSVMHEALHNHYTQKSLSLSPGK

SEQ ID NO: 23 - protein, 217 aa, Artificial Sequence
  source: /note="Description of Artificial Sequence: Synthetic polypeptide"
APELLGGPSVFLFPPKPKDTLMISRTPEVTCVVVDVSHEDPEVKFNWYVDGVEVHNAKTKPREEQYNSTYRVVSVLTVLHQDWLNGKEYKCKVSNKALPAPIEKTISKAKGQPREPQVYTLPPSRDELTKNQVSLTCLVKGFYPSDIAVWWESLGHVWAVYQTTPPVLDSDGSFFLYSKLTVPKSTWQQGWVFSCSVMHEALHNHYTQKSLSLSPGK

SEQ ID NO: 24 - protein, 217 aa, Artificial Sequence
  source: /note="Description of Artificial Sequence: Synthetic polypeptide"
APELLGGPSVFLFPPKPKDTLMISRTPEVTCVVVDVSHEDPEVKFNWYVDGVEVHNAKTKPREEQYNSTYRVVSVLTVLHQDWLNGKEYKCKVSNKALPAPIEKTISKAKGQPREPQVYTLPPSRDELTKNQVSLTCLVKGFYPSDIAVWWESYGTEWSSYKTTPPVLDSDGSFFLYSKLTVTKSEWQQGFVFSCSVMHEALHNHYTQKSLSLSPGK

SEQ ID NO: 25 - protein, 217 aa, Artificial Sequence
  source: /note="Description of Artificial Sequence: Synthetic polypeptide"
APELLGGPSVFLFPPKPKDTLMISRTPEVTCVVVDVSHEDPEVKFNWYVDGVEVHNAKTKPREEQYNSTYRVVSVLTVLHQDWLNGKEYKCKVSNKALPAPIEKTISKAKGQPREPQVYTLPPSRDELTKNQVSLTCLVKGFYPSDIAVEWESYGTEWSSYKTTPPVLDSDGSFFLYSKLTVTKEEWQQGFVFSCSVMHEALHNHYTQKSLSLSPGK

SEQ ID NO: 26 - protein, 217 aa, Artificial Sequence
  source: /note="Description of Artificial Sequence: Synthetic polypeptide"
APELLGGPSVFLFPPKPKDTLMISRTPEVTCVVVDVSHEDPEVKFNWYVDGVEVHNAKTKPREEQYNSTYRVVSVLTVLHQDWLNGKEYKCKVSNKALPAPIEKTISKAKGQPREPQVYTLPPSRDELTKNQVSLTCLVKGFYPSDIAVWWESYGTEWSSYKTTPPVLDSDGSFFLYSKLTVTKEEWQQGFVFSCSVMHEALHNHYTQKSLSLSPGK

SEQ ID NO: 27 - protein, 217 aa, Artificial Sequence
  source: /note="Description of Artificial Sequence: Synthetic polypeptide"
APELLGGPSVFLFPPKPKDTLMISRTPEVTCVVVDVSHEDPEVKFNWYVDGVEVHNAKTKPREEQYNSTYRVVSVLTVLHQDWLNGKEYKCKVSNKALPAPIEKTISKAKGQPREPQVYTLPPSRDELTKNQVSLTCLVKGFYPSDIAVEWESYGTEWSNYKTTPPVLDSDGSFFLYSKLTVTKSEWQQGFVFSCSVMHEALHNHYTQKSLSLSPGK

SEQ ID NO: 28 - protein, 217 aa, Artificial Sequence
  source: /note="Description of Artificial Sequence: Synthetic polypeptide"
APELLGGPSVFLFPPKPKDTLMISRTPEVTCVVVDVSHEDPEVKFNWYVDGVEVHNAKTKPREEQYNSTYRVVSVLTVLHQDWLNGKEYKCKVSNKALPAPIEKTISKAKGQPREPQVYTLPPSRDELTKNQVSLTCLVKGFYPSDIAVEWESYGTEWSSYQTTPPVLDSDGSFFLYSKLTVTKSEWQQGFVFSCSVMHEALHNHYTQKSLSLSPGK

SEQ ID NO: 29 - protein, 217 aa, Artificial Sequence
  source: /note="Description of Artificial Sequence: Synthetic polypeptide"
APELLGGPSVFLFPPKPKDTLMISRTPEVTCVVVDVSHEDPEVKFNWYVDGVEVHNAKTKPREEQYNSTYRVVSVLTVLHQDWLNGKEYKCKVSNKALPAPIEKTISKAKGQPREPQVYTLPPSRDELTKNQVSLTCLVKGFYPSDIAVEWESYGTEWSNYQTTPPVLDSDGSFFLYSKLTVTKSEWQQGFVFSCSVMHEALHNHYTQKSLSLSPGK

SEQ ID NO: 30 - protein, 217 aa, Artificial Sequence
  source: /note="Description of Artificial Sequence: Synthetic polypeptide"
  MOD_RES (154)..(154): Any amino acid
  MOD_RES (156)..(160): Any amino acid
  MOD_RES (183)..(183): Any amino acid
  MOD_RES (185)..(186): Any amino acid
  MOD_RES (191)..(191): Any amino acid
APELLGGPSVFLFPPKPKDTLMISRTPEVTCVVVDVSHEDPEVKFNWYVDGVEVHNAKTKPREEQYNSTYRVVSVLTVLHQDWLNGKEYKCKVSNKALPAPIEKTISKAKGQPREPQVYTLPPSRDELTKNQVSLTCLVKGFYPSDIAVEWESXGXXXXXYKTTPPVLDSDGSFFLYSKLTVXKXXWQQGXVFSCSVMHEALHNHYTQKSLSLSPGK

SEQ ID NO: 31 - protein, 181 aa, Homo sapiens
NSVIIVDKNGRLVYLVENPGGYVAYSKAATVTGKLVHANFGTKKDFEDLYTPVNGSIVIVRAGKITFAEKVANAESLNAIGVLIYMDQTKFPIVNAELSFFGHAHLGTGDPYTPGFPSFNHTQFPPSRSSGLPNIPVQTISRAAAEKLFGNMEGDCPSDWKTDSTCRMVTSESKNVKLTVS

SEQ ID NO: 32 - protein, 181 aa, Macaca fascicularis
NSVIIVDKNGGLVYLVENPGGYVAYSKAATVTGKLVHANFGTKKDFEDLDSPVNGSIVIVRAGKITFAEKVANAESLNAIGVLIYMDQTKFPIVKADLSFFGHAHLGTGDPYTPGFPSFNHTQFPPSQSSGLPNIPVQTISRAAAEKLFGNMEGDCPSDWKTDSTCKMVTSENKSVKLTVS

SEQ ID NO: 33 - protein, 159 aa, Artificial Sequence
  source: /note="Description of Artificial Sequence: Synthetic polypeptide"
SSGLPNIPVQTISRAAAEKLFGNMEGDCPSDWKTDSTCRMVTSESKNVKLTVSNDSAQNSVIIVDKNGRLVYLVENPGGYVAYSKAATVTGKLVHANFGTKKDFEDLYTPVNGSIVIVRAGKITFAEKVANAESLNAIGVLIYMDQTKFPIVNAELSGP

SEQ ID NO: 34 - protein, 159 aa, Artificial Sequence
  source: /note="Description of Artificial Sequence: Synthetic polypeptide"
SSGLPNIPVQTISRAAAEKLFGNMEGDCPSDWKTDSTCKMVTSENKSVKLTVSNDSAQNSVIIVDKNGGLVYLVENPGGYVAYSKAATVTGKLVHANFGTKKDFEDLDSPVNGSIVIVRAGKITFAEKVANAESLNAIGVLIYMDQTKFPIVKADLSGP

SEQ ID NO: 35 - protein, 12 aa, Artificial Sequence
  source: /note="Description of Artificial Sequence: Synthetic peptide"
  MOD_RES (4)..(4): Any amino acid
  MOD_RES (6)..(10): Any amino acid
WESXGXXXXXYK

SEQ ID NO: 36 - protein, 12 aa, Artificial Sequence
  source: /note="Description of Artificial Sequence: Synthetic peptide"
  MOD_RES (3)..(3): Any amino acid
  MOD_RES (5)..(6): Any amino acid
  MOD_RES (11)..(11): Any amino acid
TVXKXXWQQGXV

SEQ ID NO: 37 - protein, 5 aa, Artificial Sequence
  source: /note="Description of Artificial Sequence: Synthetic peptide"
YGTEW

SEQ ID NO: 38 - protein, 7 aa, Artificial Sequence
  source: /note="Description of Artificial Sequence: Synthetic peptide"
LGLVWVG

SEQ ID NO: 39 - protein, 7 aa, Artificial Sequence
  source: /note="Description of Artificial Sequence: Synthetic peptide"
YGTVWSH

SEQ ID NO: 40 - protein, 7 aa, Artificial Sequence
  source: /note="Description of Artificial Sequence: Synthetic peptide"
YGTEWSQ

SEQ ID NO: 41 - protein, 7 aa, Artificial Sequence
  source: /note="Description of Artificial Sequence: Synthetic peptide"
VGTPWAL

SEQ ID NO: 42 - protein, 7 aa, Artificial Sequence
  source: /note="Description of Artificial Sequence: Synthetic peptide"
YGTVWSK

SEQ ID NO: 43 - protein, 7 aa, Artificial Sequence
  source: /note="Description of Artificial Sequence: Synthetic peptide"
LGHVWAV

SEQ ID NO: 44 - protein, 7 aa, Artificial Sequence
  source: /note="Description of Artificial Sequence: Synthetic peptide"
MGHVWVG

SEQ ID NO: 45 - protein, 7 aa, Artificial Sequence
  source: /note="Description of Artificial Sequence: Synthetic peptide"
LGLVGVF

SEQ ID NO: 46 - protein, 7 aa, Artificial Sequence
  source: /note="Description of Artificial Sequence: Synthetic peptide"
YGTEWSS

SEQ ID NO: 47 - protein, 7 aa, Artificial Sequence
  source: /note="Description of Artificial Sequence: Synthetic peptide"
YGTEWSN

SEQ ID NO: 48 - protein, 7 aa, Artificial Sequence
  source: /note="Description of Artificial Sequence: Synthetic peptide"
LGHVWVG

SEQ ID NO: 49 - protein, 7 aa, Artificial Sequence
  source: /note="Description of Artificial Sequence: Synthetic peptide"
LGHVWVA

SEQ ID NO: 50 - protein, 7 aa, Artificial Sequence
  source: /note="Description of Artificial Sequence: Synthetic peptide"
LGPVWVH

SEQ ID NO: 51 - protein, 7 aa, Artificial Sequence
  source: /note="Description of Artificial Sequence: Synthetic peptide"
LGHVWVD

SEQ ID NO: 52 - protein, 7 aa, Artificial Sequence
  source: /note="Description of Artificial Sequence: Synthetic peptide"
LGHVWVN

SEQ ID NO: 53 - protein, 9 aa, Artificial Sequence
  source: /note="Description of Artificial Sequence: Synthetic peptide"
AKSTWQQGW

SEQ ID NO: 54 - protein, 9 aa, Artificial Sequence
  source: /note="Description of Artificial Sequence: Synthetic peptide"
SKSEWQQGY

SEQ ID NO: 55 - protein, 9 aa, Artificial Sequence
  source: /note="Description of Artificial Sequence: Synthetic peptide"
EKSDWQQGH

SEQ ID NO: 56 - protein, 9 aa, Artificial Sequence
  source: /note="Description of Artificial Sequence: Synthetic peptide"
LKSEWQQGW

SEQ ID NO: 57 - protein, 9 aa, Artificial Sequence
  source: /note="Description of Artificial Sequence: Synthetic peptide"
SKSEWQQGF

SEQ ID NO: 58 - protein, 9 aa, Artificial Sequence
  source: /note="Description of Artificial Sequence: Synthetic peptide"
PKSTWQQGW

SEQ ID NO: 59 - protein, 9 aa, Artificial Sequence
  source: /note="Description of Artificial Sequence: Synthetic peptide"
DKSTWQQGW

SEQ ID NO: 60 - protein, 9 aa, Artificial Sequence
  source: /note="Description of Artificial Sequence: Synthetic peptide"
TKSEWQQGF

SEQ ID NO: 61 - protein, 9 aa, Artificial Sequence
  source: /note="Description of Artificial Sequence: Synthetic peptide"
SKSEWQQGW

SEQ ID NO: 62 - protein, 15 aa, Homo sapiens
EPKSCDKTHTCPPCP

SEQ ID NO: 63 - protein, 760 aa, Homo sapiens
MMDQARSAFSNLFGGEPLSYTRFSLARQVDGDNSHVEMKLAVDEEENADNNTKANVTKPKRCSGSICYGTIAVIVFFLIGFMIGYLGYCKGVEPKTECERLAGTESPVREEPGEDFPAARRLYWDDLKRKLSEKLDSTDFTGTIKLLNENSYVPREAGSQKDENLALYVENQFREFKLSKVWRDQHFVKIQVKDSAQNSVIIVDKNGRLVYLVENPGGYVAYSKAATVTGKLVHANFGTKKDFEDLYTPVNGSIVIVRAGKITFAEKVANAESLNAIGVLIYMDQTKFPIVNAELSFFGHAHLGTGDPYTPGFPSFNHTQFPPSRSSGLPNIPVQTISRAAAEKLFGNMEGDCPSDWKTDSTCRMVTSESKNVKLTVSNVLKEIKILNIFGVIKGFVEPDHYVVVGAQRDAWGPGAAKSGVGTALLLKLAQMFSDMVLKDGFQPSRSIIFASWSAGDFGSVGATEWLEGYLSSLHLKAFTYINLDKAVLGTSNFKVSASPLLYTLIEKTMQNVKHPVTGQFLYQDSNWASKVEKLTLDNAAFPFLAYSGIPAVSFCFCEDTDYPYLGTTMDTYKELIERIPELNKVARAAAEVAGQFVIKLTHDVELNLDYERYNSQLLSFVRDLNQYRADIKEMGLSLQWLYSARGDFFRATSRLTTDFGNAEKTDRFVMKKLNDRVMRVEYHFLSPYVSPKESPFRHVFWGSGSHTLPALLENLKLRKQNNGAFNETLFRNQLALATWTIQGAANALSGDVWDIDNEF

SEQ ID NO: 64 - protein, 217 aa, Artificial Sequence; identical to SEQ ID NO: 24
  source: /note="Description of Artificial Sequence: Synthetic polypeptide"

SEQ ID NO: 65 - protein, 217 aa, Artificial Sequence; identical to SEQ ID NO: 25
  source: /note="Description of Artificial Sequence: Synthetic polypeptide"

SEQ ID NO: 66 - protein, 217 aa, Artificial Sequence; identical to SEQ ID NO: 26
  source: /note="Description of Artificial Sequence: Synthetic polypeptide"

SEQ ID NO: 67 - protein, 217 aa, Artificial Sequence
  source: /note="Description of Artificial Sequence: Synthetic polypeptide"
APELLGGPSVFLFPPKPKDTLMISRTPEVTCVVVDVSHEDPEVKFNWYVDGVEVHNAKTKPREEQYNSTYRVVSVLTVLHQDWLNGKEYKCKVSNKALPAPIEKTISKAKGQPREPQVYTLPPSRDELTKNQVSLTCLVKGFYPSDIAVWWESYGTEWSNYKTTPPVLDSDGSFFLYSKLTVTKSEWQQGFVFSCSVMHEALHNHYTQKSLSLSPGK

SEQ ID NO: 68 - protein, 217 aa, Artificial Sequence
  source: /note="Description of Artificial Sequence: Synthetic polypeptide"
APELLGGPSVFLFPPKPKDTLMISRTPEVTCVVVDVSHEDPEVKFNWYVDGVEVHNAKTKPREEQYNSTYRVVSVLTVLHQDWLNGKEYKCKVSNKALPAPIEKTISKAKGQPREPQVYTLPPSRDELTKNQVSLTCLVKGFYPSDIAVEWESYGTEWSNYKTTPPVLDSDGSFFLYSKLTVTKEEWQQGFVFSCSVMHEALHNHYTQKSLSLSPGK

SEQ ID NO: 69 - protein, 217 aa, Artificial Sequence
  source: /note="Description of Artificial Sequence: Synthetic polypeptide"
APELLGGPSVFLFPPKPKDTLMISRTPEVTCVVVDVSHEDPEVKFNWYVDGVEVHNAKTKPREEQYNSTYRVVSVLTVLHQDWLNGKEYKCKVSNKALPAPIEKTISKAKGQPREPQVYTLPPSRDELTKNQVSLTCLVKGFYPSDIAVWWESYGTEWSNYKTTPPVLDSDGSFFLYSKLTVTKEEWQQGFVFSCSVMHEALHNHYTQKSLSLSPGK

SEQ ID NO: 70 - protein, 217 aa, Artificial Sequence; identical to SEQ ID NO: 21
  source: /note="Description of Artificial Sequence: Synthetic polypeptide"

SEQ ID NO: 71 - protein, 217 aa, Artificial Sequence
  source: /note="Description of Artificial Sequence: Synthetic polypeptide"
APELLGGPSVFLFPPKPKDTLMISRTPEVTCVVVDVSHEDPEVKFNWYVDGVEVHNAKTKPREEQYNSTYRVVSVLTVLHQDWLNGKEYKCKVSNKALPAPIEKTISKAKGQPREPQVYTLPPSRDELTKNQVSLTCLVKGFYPSDIAVLWESLGHVWAVYKTTPPVLDSDGSFFLYSKLTVPKSTWQQGWVFSCSVMHEALHNHYTQKSLSLSPGK

SEQ ID NO: 72 - protein, 217 aa, Artificial Sequence
  source: /note="Description of Artificial Sequence: Synthetic polypeptide"
APELLGGPSVFLFPPKPKDTLMISRTPEVTCVVVDVSHEDPEVKFNWYVDGVEVHNAKTKPREEQYNSTYRVVSVLTVLHQDWLNGKEYKCKVSNKALPAPIEKTISKAKGQPREPQVYTLPPSRDELTKNQVSLTCLVKGFYPSDIAVYWESLGHVWAVYKTTPPVLDSDGSFFLYSKLTVPKSTWQQGWVFSCSVMHEALHNHYTQKSLSLSPGK

SEQ ID NO: 73 - protein, 217 aa, Artificial Sequence; identical to SEQ ID NO: 22
  source: /note="Description of Artificial Sequence: Synthetic polypeptide"

SEQ ID NO: 74 - protein, 217 aa, Artificial Sequence
  source: /note="Description of Artificial Sequence: Synthetic polypeptide"
APELLGGPSVFLFPPKPKDTLMISRTPEVTCVVVDVSHEDPEVKFNWYVDGVEVHNAKTKPREEQYNSTYRVVSVLTVLHQDWLNGKEYKCKVSNKALPAPIEKTISKAKGQPREPQVYTLPPSRDELTKNQVSLTCLVKGFYPSDIAVEWESLGHVWAVYFTTPPVLDSDGSFFLYSKLTVPKSTWQQGWVFSCSVMHEALHNHYTQKSLSLSPGK

SEQ ID NO: 75 - protein, 217 aa, Artificial Sequence
  source: /note="Description of Artificial Sequence: Synthetic polypeptide"
APELLGGPSVFLFPPKPKDTLMISRTPEVTCVVVDVSHEDPEVKFNWYVDGVEVHNAKTKPREEQYNSTYRVVSVLTVLHQDWLNGKEYKCKVSNKALPAPIEKTISKAKGQPREPQVYTLPPSRDELTKNQVSLTCLVKGFYPSDIAVEWESLGHVWAVYHTTPPVLDSDGSFFLYSKLTVPKSTWQQGWVFSCSVMHEALHNHYTQKSLSLSPGK

SEQ ID NO: 76 - protein, 217 aa, Artificial Sequence
  source: /note="Description of Artificial Sequence: Synthetic polypeptide"
APELLGGPSVFLFPPKPKDTLMISRTPEVTCVVVDVSHEDPEVKFNWYVDGVEVHNAKTKPREEQYNSTYRVVSVLTVLHQDWLNGKEYKCKVSNKALPAPIEKTISKAKGQPREPQVYTLPPSRDELTKNQVSLTCLVKGFYPSDIAVLWESYGTEWSSYKTTPPVLDSDGSFFLYSKLTVTKSEWQQGFVFSCSVMHEALHNHYTQKSLSLSPGK

SEQ ID NO: 77 - protein, 217 aa, Artificial Sequence
  source: /note="Description of Artificial Sequence: Synthetic polypeptide"
APELLGGPSVFLFPPKPKDTLMISRTPEVTCVVVDVSHEDPEVKFNWYVDGVEVHNAKTKPREEQYNSTYRVVSVLTVLHQDWLNGKEYKCKVSNKALPAPIEKTISKAKGQPREPQVYTLPPSRDELTKNQVSLTCLVKGFYPSDIAVLWESYGTEWSSYRTTPPVLDSDGSFFLYSKLTVTKSEWQQGFVFSCSVMHEALHNHYTQKSLSLSPGK

SEQ ID NO: 78 - protein, 217 aa, Artificial Sequence
  source: /note="Description of Artificial Sequence: Synthetic polypeptide"
APELLGGPSVFLFPPKPKDTLMISRTPEVTCVVVDVSHEDPEVKFNWYVDGVEVHNAKTKPREEQYNSTYRVVSVLTVLHQDWLNGKEYKCKVSNKALPAPIEKTISKAKGQPREPQVYTLPPSRDELTKNQVSLTCLVKGFYPSDIAVLWESYGTEWSSYRTTPPVLDSDGSFFLYSKLTVTREEWQQGFVFSCSVMHEALHNHYTQKSLSLSPGK

SEQ ID NO: 79 - protein, 217 aa, Artificial Sequence
  source: /note="Description of Artificial Sequence: Synthetic polypeptide"
APELLGGPSVFLFPPKPKDTLMISRTPEVTCVVVDVSHEDPEVKFNWYVDGVEVHNAKTKPREEQYNSTYRVVSVLTVLHQDWLNGKEYKCKVSNKALPAPIEKTISKAKGQPREPQVYTLPPSRDELTKNQVSLTCLVKGFYPSDIAVLWESYGTEWSSYRTTPPVLDSDGSFFLYSKLTVTGEEWQQGFVFSCSVMHEALHNHYTQKSLSLSPGK

SEQ ID NO: 80 - protein, 217 aa, Artificial Sequence
  source: /note="Description of Artificial Sequence: Synthetic polypeptide"
APELLGGPSVFLFPPKPKDTLMISRTPEVTCVVVDVSHEDPEVKFNWYVDGVEVHNAKTKPREEQYNSTYRVVSVLTVLHQDWLNGKEYKCKVSNKALPAPIEKTISKAKGQPREPQVYTLPPSRDELTKNQVSLTCLVKGFYPSDIAVLWESYGTEWSSYRTTPPVLDSDGSFFLYSKLTVTREEWQQGFVFSCWVMHEALHNHYTQKSLSLSPGK

SEQ ID NO: 81 - protein, 217 aa, Artificial Sequence
  source: /note="Description of Artificial Sequence: Synthetic polypeptide"
APELLGGPSVFLFPPKPKDTLMISRTPEVTCVVVDVSHEDPEVKFNWYVDGVEVHNAKTKPREEQYNSTYRVVSVLTVLHQDWLNGKEYKCKVSNKALPAPIEKTISKAKGQPREPQVYTLPPSRDELTKNQVSLTCLVKGFYPSDIAVLWESYGTEWSSYRTTPPVLDSDGSFFLYSKLTVTKEEWQQGFVFSCWVMHEALHNHYTQKSLSLSPGK

SEQ ID NO: 82 - protein, 217 aa, Artificial Sequence
  source: /note="Description of Artificial Sequence: Synthetic polypeptide"
APELLGGPSVFLFPPKPKDTLMISRTPEVTCVVVDVSHEDPEVKFNWYVDGVEVHNAKTKPREEQYNSTYRVVSVLTVLHQDWLNGKEYKCKVSNKALPAPIEKTISKAKGQPREPQVYTLPPSRDELTKNQVSLTCLVKGFYPSDIAVLWESYGTEWSSYRTTPPVLDSDGSFFLYSKLTVTREEWQQGFVFTCWVMHEALHNHYTQKSLSLSPGK

SEQ ID NO: 83 - protein, 217 aa, Artificial Sequence
  source: /note="Description of Artificial Sequence: Synthetic polypeptide"
APELLGGPSVFLFPPKPKDTLMISRTPEVTCVVVDVSHEDPEVKFNWYVDGVEVHNAKTKPREEQYNSTYRVVSVLTVLHQDWLNGKEYKCKVSNKALPAPIEKTISKAKGQPREPQVYTLPPSRDELTKNQVSLTCLVKGFYPSDIAVLWESYGTEWSSYRTTPPVLDSDGSFFLYSKLTVTREEWQQGFVFTCGVMHEALHNHYTQKSLSLSPGK

SEQ ID NO: 84 - protein, 217 aa, Artificial Sequence
  source: /note="Description of Artificial Sequence: Synthetic polypeptide"
APELLGGPSVFLFPPKPKDTLMISRTPEVTCVVVDVSHEDPEVKFNWYVDGVEVHNAKTKPREEQYNSTYRVVSVLTVLHQDWLNGKEYKCKVSNKALPAPIEKTISKAKGQPREPQVYTLPPSRDELTKNQVSLTCLVKGFYPSDIAVLWESYGTEWSSYRTTPPVLDSDGSFFLYSKLTVTREEWQQGFVFECWVMHEALHNHYTQKSLSLSPGK

SEQ ID NO: 85 - protein, 217 aa, Artificial Sequence
  source: /note="Description of Artificial Sequence: Synthetic polypeptide"
APELLGGPSVFLFPPKPKDTLMISRTPEVTCVVVDVSHEDPEVKFNWYVDGVEVHNAKTKPREEQYNSTYRVVSVLTVLHQDWLNGKEYKCKVSNKALPAPIEKTISKAKGQPREPQVYTLPPSRDELTKNQVSLTCLVKGFYPSDIAVLWESYGTEWSSYRTTPPVLDSDGSFFLYSKLTVTREEWQQGFVFKCWVMHEALHNHYTQKSLSLSPGK

SEQ ID NO: 86 - protein, 217 aa, Artificial Sequence
  source: /note="Description of Artificial Sequence: Synthetic polypeptide"
APELLGGPSVFLFPPKPKDTLMISRTPEVTCVVVDVSHEDPEVKFNWYVDGVEVHNAKTKPREEQYNSTYRVVSVLTVLHQDWLNGKEYKCKVSNKALPAPIEKTISKAKGQPREPQVYTLPPSRDELTKNQVSLTCLVKGFYPSDIAVLWESYGTEWSSYRTTPPVLDSDGSFFLYSKLTVTPEEWQQGFVFKCWVMHEALHNHYTQKSLSLSPGK

SEQ ID NO: 87 - protein, 217 aa, Artificial Sequence
  source: /note="Description of Artificial Sequence: Synthetic polypeptide"
APELLGGPSVFLFPPKPKDTLMISRTPEVTCVVVDVSHEDPEVKFNWYVDGVEVHNAKTKPREEQYNSTYRVVSVLTVLHQDWLNGKEYKCKVSNKALPAPIEKTISKAKGQPREPQVYTLPPSRDELTKNQVSLTCLVKGFYPSDIAVWWESYGTEWSSYRTTPPVLDSDGSFFLYSKLTVTREEWQQGFVFSCSVMHEALHNHYTQKSLSLSPGK

SEQ ID NO: 88 - protein, 217 aa, Artificial Sequence
  source: /note="Description of Artificial Sequence: Synthetic polypeptide"
APELLGGPSVFLFPPKPKDTLMISRTPEVTCVVVDVSHEDPEVKFNWYVDGVEVHNAKTKPREEQYNSTYRVVSVLTVLHQDWLNGKEYKCKVSNKALPAPIEKTISKAKGQPREPQVYTLPPSRDELTKNQVSLTCLVKGFYPSDIAVWWESYGTEWSSYRTTPPVLDSDGSFFLYSKLTVTGEEWQQGFVFSCSVMHEALHNHYTQKSLSLSPGK

SEQ ID NO: 89 - protein, 217 aa, Artificial Sequence
  source: /note="Description of Artificial Sequence: Synthetic polypeptide"
APELLGGPSVFLFPPKPKDTLMISRTPEVTCVVVDVSHEDPEVKFNWYVDGVEVHNAKTKPREEQYNSTYRVVSVLTVLHQDWLNGKEYKCKVSNKALPAPIEKTISKAKGQPREPQVYTLPPSRDELTKNQVSLTCLVKGFYPSDIAVWWESYGTEWSSYRTTPPVLDSDGSFFLYSKLTVTREEWQQGFVFTCWVMHEALHNHYTQKSLSLSPGK

SEQ ID NO: 90 - protein, 217 aa, Artificial Sequence
  source: /note="Description of Artificial Sequence: Synthetic polypeptide"
APELLGGPSVFLFPPKPKDTLMISRTPEVTCVVVDVSHEDPEVKFNWYVDGVEVHNAKTKPREEQYNSTYRVVSVLTVLHQDWLNGKEYKCKVSNKALPAPIEKTISKAKGQPREPQVYTLPPSRDELTKNQVSLTCLVKGFYPSDIAVWWESYGTEWSSYRTTPPVLDSDGSFFLYSKLTVTGEEWQQGFVFTCWVMHEALHNHYTQKSLSLSPGK

SEQ ID NO: 91 - protein, 217 aa, Artificial Sequence
  source: /note="Description of Artificial Sequence: Synthetic polypeptide"
APELLGGPSVFLFPPKPKDTLMISRTPEVTCVVVDVSHEDPEVKFNWYVDGVEVHNAKTKPREEQYNSTYRVVSVLTVLHQDWLNGKEYKCKVSNKALPAPIEKTISKAKGQPREPQVYTLPPSRDELTKNQVSLTCLVKGFYPSDIAVWWESYGTEWSSYRTTPPVLDSDGSFFLYSKLTVTREEWQQGFVFTCGVMHEALHNHYTQKSLSLSPGK

SEQ ID NO: 92 - protein, 217 aa, Artificial Sequence
  source: /note="Description of Artificial Sequence: Synthetic polypeptide"
APELLGGPSVFLFPPKPKDTLMISRTPEVTCVVVDVSHEDPEVKFNWYVDGVEVHNAKTKPREEQYNSTYRVVSVLTVLHQDWLNGKEYKCKVSNKALPAPIEKTISKAKGQPREPQVYTLPPSRDELTKNQVSLTCLVKGFYPSDIAVLWESYGTEWSSYKTTPPVLDSDGSFFLYSKLTVTKEEWQQGFVFSCSVMHEALHNHYTQKSLSLSPGK

SEQ ID NO: 93 - protein, 217 aa, Artificial Sequence
  source: /note="Description of Artificial Sequence: Synthetic polypeptide"
APELLGGPSVFLFPPKPKDTLMISRTPEVTCVVVDVSHEDPEVKFNWYVDGVEVHNAKTKPREEQYNSTYRVVSVLTVLHQDWLNGKEYKCKVSNKALPAPIEKTISKAKGQPREPQVYTLPPSRDELTKNQVSLTCLVKGFYPSDIAVLWESYGTEWSSYRTTPPVLDSDGSFFLYSKLTVTKEEWQQGFVFSCSVMHEALHNHYTQKSLSLSPGK

SEQ ID NO: 94 - protein, 217 aa, Artificial Sequence
  source: /note="Description of Artificial Sequence: Synthetic polypeptide"
APELLGGPSVFLFPPKPKDTLMISRTPEVTCVVVDVSHEDPEVKFNWYVDGVEVHNAKTKPREEQYNSTYRVVSVLTVLHQDWLNGKEYKCKVSNKALPAPIEKTISKAKGQPREPQVYTLPPSRDELTKNQVSLTCLVKGFYPSDIAVEWESFGTEWSSYKTTPPVLDSDGSFFLYSKLTVTKEEWQQGFVFSCSVMHEALHNHYTQKSLSLSPGK

SEQ ID NO: 95 - protein, 217 aa, Artificial Sequence
  source: /note="Description of Artificial Sequence: Synthetic polypeptide"
APELLGGPSVFLFPPKPKDTLMISRTPEVTCVVVDVSHEDPEVKFNWYVDGVEVHNAKTKPREEQYNSTYRVVSVLTVLHQDWLNGKEYKCKVSNKALPAPIEKTISKAKGQPREPQVYTLPPSRDELTKNQVSLTCLVKGFYPSDIAVEWESYGTEWASYKTTPPVLDSDGSFFLYSKLTVTKEEWQQGFVFSCSVMHEALHNHYTQKSLSLSPGK

SEQ ID NO: 96 - protein, 217 aa, Artificial Sequence
  source: /note="Description of Artificial Sequence: Synthetic polypeptide"
APELLGGPSVFLFPPKPKDTLMISRTPEVTCVVVDVSHEDPEVKFNWYVDGVEVHNAKTKPREEQYNSTYRVVSVLTVLHQDWLNGKEYKCKVSNKALPAPIEKTISKAKGQPREPQVYTLPPSRDELTKNQVSLTCLVKGFYPSDIAVEWESYGTEWVSYKTTPPVLDSDGSFFLYSKLTVTKEEWQQGFVFSCSVMHEALHNHYTQKSLSLSPGK

SEQ ID NO: 97 - protein, 217 aa, Artificial Sequence
  source: /note="Description of Artificial Sequence: Synthetic polypeptide"
APELLGGPSVFLFPPKPKDTLMISRTPEVTCVVVDVSHEDPEVKFNWYVDGVEVHNAKTKPREEQYNSTYRVVSVLTVLHQDWLNGKEYKCKVSNKALPAPIEKTISKAKGQPREPQVYTLPPSRDELTKNQVSLTCLVKGFYPSDIAVEWESYGTEWSSYKTTPPVLDSDGSFFLYSKLTVSKEEWQQGFVFSCSVMHEALHNHYTQKSLSLSPGK

SEQ ID NO: 98 - protein, 217 aa, Artificial Sequence
  source: /note="Description of Artificial Sequence: Synthetic polypeptide"
APELLGGPSVFLFPPKPKDTLMISRTPEVTCVVVDVSHEDPEVKFNWYVDGVEVHNAKTKPREEQYNSTYRVVSVLTVLHQDWLNGKEYKCKVSNKALPAPIEKTISKAKGQPREPQVYTLPPSRDELTKNQVSLTCLVKGFYPSDIAVEWESFGTEWASYKTTPPVLDSDGSFFLYSKLTVTKEEWQQGFVFSCSVMHEALHNHYTQKSLSLSPGK

SEQ ID NO: 99 - protein, 217 aa, Artificial Sequence
  source: /note="Description of Artificial Sequence: Synthetic polypeptide"
APELLGGPSVFLFPPKPKDTLMISRTPEVTCVVVDVSHEDPEVKFNWYVDGVEVHNAKTKPREEQYNSTYRVVSVLTVLHQDWLNGKEYKCKVSNKALPAPIEKTISKAKGQPREPQVYTLPPSRDELTKNQVSLTCLVKGFYPSDIAVEWESFGTEWVSYKTTPPVLDSDGSFFLYSKLTVTKEEWQQGFVFSCSVMHEALHNHYTQKSLSLSPGK

SEQ ID NO: 100 - protein, 217 aa, Artificial Sequence
  source: /note="Description of Artificial Sequence: Synthetic polypeptide"
APELLGGPSVFLFPPKPKDTLMISRTPEVTCVVVDVSHEDPEVKFNWYVDGVEVHNAKTKPREEQYNSTYRVVSVLTVLHQDWLNGKEYKCKVSNKALPAPIEKTISKAKGQPREPQVYTLPPSRDELTKNQVSLTCLVKGFYPSDIAVWWESFGTEWSSYKTTPPVLDSDGSFFLYSKLTVTKEEWQQGFVFSCSVMHEALHNHYTQKSLSLSPGK

SEQ ID NO: 101 - protein, 217 aa, Artificial Sequence
  source: /note="Description of Artificial Sequence: Synthetic polypeptide"
APELLGGPSVFLFPPKPKDTLMISRTPEVTCVVVDVSHEDPEVKFNWYVDGVEVHNAKTKPREEQYNSTYRVVSVLTVLHQDWLNGKEYKCKVSNKALPAPIEKTISKAKGQPREPQVYTLPPSRDELTKNQVSLTCLVKGFYPSDIAVWWESYGTEWASYKTTPPVLDSDGSFFLYSKLTVTKEEWQQGFVFSCSVMHEALHNHYTQKSLSLSPGK

SEQ ID NO: 102 - protein, 217 aa, Artificial Sequence
  source: /note="Description of Artificial Sequence: Synthetic polypeptide"
APELLGGPSVFLFPPKPKDTLMISRTPEVTCVVVDVSHEDPEVKFNWYVDGVEVHNAKTKPREEQYNSTYRVVSVLTVLHQDWLNGKEYKCKVSNKALPAPIEKTISKAKGQPREPQVYTLPPSRDELTKNQVSLTCLVKGFYPSDIAVWWESYGTEWVSYKTTPPVLDSDGSFFLYSKLTVTKEEWQQGFVFSCSVMHEALHNHYTQKSLSLSPGK

SEQ ID NO: 103 - protein, 217 aa, Artificial Sequence
  source: /note="Description of Artificial Sequence: Synthetic polypeptide"
APELLGGPSVFLFPPKPKDTLMISRTPEVTCVVVDVSHEDPEVKFNWYVDGVEVHNAKTKPREEQYNSTYRVVSVLTVLHQDWLNGKEYKCKVSNKALPAPIEKTISKAKGQPREPQVYTLPPSRDELTKNQVSLTCLVKGFYPSDIAVWWESYGTEWSSYKTTPPVLDSDGSFFLYSKLTVSKEEWQQGFVFSCSVMHEALHNHYTQKSLSLSPGK

SEQ ID NO: 104 - protein, 217 aa, Artificial Sequence
  source: /note="Description of Artificial Sequence: Synthetic polypeptide"
APELLGGPSVFLFPPKPKDTLMISRTPEVTCVVVDVSHEDPEVKFNWYVDGVEVHNAKTKPREEQYNSTYRVVSVLTVLHQDWLNGKEYKCKVSNKALPAPIEKTISKAKGQPREPQVYTLPPSRDELTKNQVSLTCLVKGFYPSDIAVWWESFGTEWASYKTTPPVLDSDGSFFLYSKLTVTKEEWQQGFVFSCSVMHEALHNHYTQKSLSLSPGK

SEQ ID NO: 105 - protein, 217 aa, Artificial Sequence
  source: /note="Description of Artificial Sequence: Synthetic polypeptide"
APELLGGPSVFLFPPKPKDTLMISRTPEVTCVVVDVSHEDPEVKFNWYVDGVEVHNAKTKPREEQYNSTYRVVSVLTVLHQDWLNGKEYKCKVSNKALPAPIEKTISKAKGQPREPQVYTLPPSRDELTKNQVSLTCLVKGFYPSDIAVWWESFGTEWVSYKTTPPVLDSDGSFFLYSKLTVTKEEWQQGFVFSCSVMHEALHNHYTQKSLSLSPGK

SEQ ID NO: 106 - protein, 217 aa, Artificial Sequence
  source: /note="Description of Artificial Sequence: Synthetic polypeptide"
APELLGGPSVFLFPPKPKDTLMISRTPEVTCVVVDVSHEDPEVKFNWYVDGVEVHNAKTKPREEQYNSTYRVVSVLTVLHQDWLNGKEYKCKVSNKALPAPIEKTISKAKGQPREPQVYTLPPSRDELTKNQVSLTCLVKGFYPSDIAVEWESFGTEWSNYKTTPPVLDSDGSFFLYSKLTVTKEEWQQGFVFSCSVMHEALHNHYTQKSLSLSPGK

SEQ ID NO: 107 - protein, 217 aa, Artificial Sequence
  source: /note="Description of Artificial Sequence: Synthetic polypeptide"
APELLGGPSVFLFPPKPKDTLMISRTPEVTCVVVDVSHEDPEVKFNWYVDGVEVHNAKTKPREEQYNSTYRVVSVLTVLHQDWLNGKEYKCKVSNKALPAPIEKTISKAKGQPREPQVYTLPPSRDELTKNQVSLTCLVKGFYPSDIAVEWESYGTEWANYKTTPPVLDSDGSFFLYSKLTVTKEEWQQGFVFSCSVMHEALHNHYTQKSLSLSPGK

SEQ ID NO: 108 - protein, 217 aa, Artificial Sequence
  source: /note="Description of Artificial Sequence: Synthetic polypeptide"
APELLGGPSVFLFPPKPKDTLMISRTPEVTCVVVDVSHEDPEVKFNWYVDGVEVHNAKTKPREEQYNSTYRVVSVLTVLHQDWLNGKEYKCKVSNKALPAPIEKTISKAKGQPREPQVYTLPPSRDELTKNQVSLTCLVKGFYPSDIAVEWESYGTEWVNYKTTPPVLDSDGSFFLYSKLTVTKEEWQQGFVFSCSVMHEALHNHYTQKSLSLSPGK

SEQ ID NO: 109 - protein, 217 aa, Artificial Sequence
  source: /note="Description of Artificial Sequence: Synthetic polypeptide"
APELLGGPSVFLFPPKPKDTLMISRTPEVTCVVVDVSHEDPEVKFNWYVDGVEVHNAKTKPREEQYNSTYRVVSVLTVLHQDWLNGKEYKCKVSNKALPAPIEKTISKAKGQPREPQVYTLPPSRDELTKNQVSLTCLVKGFYPSDIAVEWESYGTEWSNYKTTPPVLDSDGSFFLYSKLTVSKEEWQQGFVFSCSVMHEALHNHYTQKSLSLSPGK

SEQ ID NO: 110 - protein, 217 aa, Artificial Sequence
  source: /note="Description of Artificial Sequence: Synthetic polypeptide"
APELLGGPSVFLFPPKPKDTLMISRTPEVTCVVVDVSHEDPEVKFNWYVDGVEVHNAKTKPREEQYNSTYRVVSVLTVLHQDWLNGKEYKCKVSNKALPAPIEKTISKAKGQPREPQVYTLPPSRDELTKNQVSLTCLVKGFYPSDIAVEWESFGTEWANYKTTPPVLDSDGSFFLYSKLTVTKEEWQQGFVFSCSVMHEALHNHYTQKSLSLSPGK

SEQ ID NO: 111 - protein, 217 aa, Artificial Sequence
  source: /note="Description of Artificial Sequence: Synthetic polypeptide"
APELLGGPSVFLFPPKPKDTLMISRTPEVTCVVVDVSHEDPEVKFNWYVDGVEVHNAKTKPREEQYNSTYRVVSVLTVLHQDWLNGKEYKCKVSNKALPAPIEKTISKAKGQPREPQVYTLPPSRDELTKNQVSLTCLVKGFYPSDIAVEWESFGTEWVNYKTTPPVLDSDGSFFLYSKLTVTKEEWQQGFVFSCSVMHEALHNHYTQKSLSLSPGK

SEQ ID NO: 112 - protein, 217 aa, Artificial Sequence
  source: /note="Description of Artificial Sequence: Synthetic polypeptide"
APELLGGPSVFLFPPKPKDTLMISRTPEVTCVVVDVSHEDPEVKFNWYVDGVEVHNAKTKPREEQYNSTYRVVSVLTVLHQDWLNGKEYKCKVSNKALPAPIEKTISKAKGQPREPQVYTLPPSRDELTKNQVSLTCLVKGFYPSDIAVWWESFGTEWSNYKTTPPVLDSDGSFFLYSKLTVTKEEWQQGFVFSCSVMHEALHNHYTQKSLSLSPGK

SEQ ID NO: 113 - protein, 217 aa, Artificial Sequence
  source: /note="Description of Artificial Sequence: Synthetic polypeptide"
APELLGGPSVFLFPPKPKDTLMISRTPEVTCVVVDVSHEDPEVKFNWYVDGVEVHNAKTKPREEQYNSTYRVVSVLTVLHQDWLNGKEYKCKVSNKALPAPIEKTISKAKGQPREPQVYTLPPSRDELTKNQVSLTCLVKGFYPSDIAVWWESYGTEWANYKTTPPVLDSDGSFFLYSKLTVTKEEWQQGFVFSCSVMHEALHNHYTQKSLSLSPGK

SEQ ID NO: 114 - protein, 217 aa, Artificial Sequence
  source: /note="Description of Artificial Sequence: Synthetic polypeptide"
APELLGGPSVFLFPPKPKDTLMISRTPEVTCVVVDVSHEDPEVKFNWYVDGVEVHNAKTKPREEQYNSTYRVVSVLTVLHQDWLNGKEYKCKVSNKALPAPIEKTISKAKGQPREPQVYTLPPSRDELTKNQVSLTCLVKGFYPSDIAVWWESYGTEWVNYKTTPPVLDSDGSFFLYSKLTVTKEEWQQGFVFSCSVMHEALHNHYTQKSLSLSPGK

SEQ ID NO: 115 - protein, 217 aa, Artificial Sequence
  source: /note="Description of Artificial Sequence: Synthetic polypeptide"
APELLGGPSVFLFPPKPKDTLMISRTPEVTCVVVDVSHEDPEVKFNWYVDGVEVHNAKTKPREEQYNSTYRVVSVLTVLHQDWLNGKEYKCKVSNKALPAPIEKTISKAKGQPREPQVYTLPPSRDELTKNQVSLTCLVKGFYPSDIAVWWESYGTEWSNYKTTPPVLDSDGSFFLYSKLTVSKEEWQQGFVFSCSVMHEALHNHYTQKSLSLSPGK

SEQ ID NO: 116 - protein, 217 aa, Artificial Sequence
  source: /note="Description of Artificial Sequence: Synthetic polypeptide"
APELLGGPSVFLFPPKPKDTLMISRTPEVTCVVVDVSHEDPEVKFNWYVDGVEVHNAKTKPREEQYNSTYRVVSVLTVLHQDWLNGKEYKCKVSNKALPAPIEKTISKAKGQPREPQVYTLPPSRDELTKNQVSLTCLVKGFYPSDIAVWWESFGTEWANYKTTPPVLDSDGSFFLYSKLTVTKEEWQQGFVFSCSVMHEALHNHYTQKSLSLSPGK

SEQ ID NO: 117 - protein, 217 aa, Artificial Sequence
  source: /note="Description of Artificial Sequence: Synthetic polypeptide"
APELLGGPSVFLFPPKPKDTLMISRTPEVTCVVVDVSHEDPEVKFNWYVDGVEVHNAKTKPREEQYNSTYRVVSVLTVLHQDWLNGKEYKCKVSNKALPAPIEKTISKAKGQPREPQVYTLPPSRDELTKNQVSLTCLVKGFYPSDIAVWWESFGTEWVNYKTTPPVLDSDGSFFLYSKLTVTKEEWQQGFVFSCSVMHEALHNHYTQKSLSLSPGK

SEQ ID NO: 118 - protein, 217 aa, Artificial Sequence
  source: /note="Description of Artificial Sequence: Synthetic polypeptide"
APELLGGPSVFLFPPKPKDTLMISRTPEVTCVVVDVSHEDPEVKFNWYVDGVEVHNAKTKPREEQYNSTYRVVSVLTVLHQDWLNGKEYKCKVSNKALPAPIEKTISKAKGQPREPQVYTLPPSRDELTKNQVSLTCLVKGFYPSDIAVLWESFGTEWSSYKTTPPVLDSDGSFFLYSKLTVTKEEWQQGFVFSCSVMHEALHNHYTQKSLSLSPGK

SEQ ID NO: 119 - protein, 217 aa, Artificial Sequence
  source: /note="Description of Artificial Sequence: Synthetic polypeptide"
APELLGGPSVFLFPPKPKDTLMISRTPEVTCVVVDVSHEDPEVKFNWYVDGVEVHNAKTKPREEQYNSTYRVVSVLTVLHQDWLNGKEYKCKVSNKALPAPIEKTISKAKGQPREPQVYTLPPSRDELTKNQVSLTCLVKGFYPSDIAVLWESYGTEWASYKTTPPVLDSDGSFFLYSKLTVTKEEWQQGFVFSCSVMHEALHNHYTQKSLSLSPGK

SEQ ID NO: 120 - protein, 217 aa, Artificial Sequence
  source: /note="Description of Artificial Sequence: Synthetic polypeptide"
APELLGGPSVFLFPPKPKDTLMISRTPEVTCVVVDVSHEDPEVKFNWYVDGVEVHNAKTKPREEQYNSTYRVVSVLTVLHQDWLNGKEYKCKVSNKALPAPIEKTISKAKGQPREPQVYTLPPSRDELTKNQVSLTCLVKGFYPSDIAVLWESYGTEWVSYKTTPPVLDSDGSFFLYSKLTVTKEEWQQGFVFSCSVMHEALHNHYTQKSLSLSPGK

SEQ ID NO: 121 - protein, 217 aa, Artificial Sequence
  source: /note="Description of Artificial Sequence: Synthetic polypeptide"
APELLGGPSVFLFPPKPKDTLMISRTPEVTCVVVDVSHEDPEVKFNWYVDGVEVHNAKTKPREEQYNSTYRVVSVLTVLHQDWLNGKEYKCKVSNKALPAPIEKTISKAKGQPREPQVYTLPPSRDELTKNQVSLTCLVKGFYPSDIAVLWESYGTEWSSYKTTPPVLDSDGSFFLYSKLTVSKEEWQQGFVFSCSVMHEALHNHYTQKSLSLSPGK

SEQ ID NO: 122 - protein, 217 aa, Artificial Sequence
  source: /note="Description of Artificial Sequence: Synthetic polypeptide"
APELLGGPSVFLFPPKPKDTLMISRTPEVTCVVVDVSHEDPEVKFNWYVDGVEVHNAKTKPREEQYNSTYRVVSVLTVLHQDWLNGKEYKCKVSNKALPAPIEKTISKAKGQPREPQVYTLPPSRDELTKNQVSLTCLVKGFYPSDIAVLWESFGTEWASYKTTPPVLDSDGSFFLYSKLTVTKEEWQQGFVFSCSVMHEALHNHYTQKSLSLSPGK

SEQ ID NO: 123 - protein, 217 aa, Artificial Sequence
  source: /note="Description of Artificial Sequence: Synthetic polypeptide"
APELLGGPSVFLFPPKPKDTLMISRTPEVTCVVVDVSHEDPEVKFNWYVDGVEVHNAKTKPREEQYNSTYRVVSVLTVLHQDWLNGKEYKCKVSNKALPAPIEKTISKAKGQPREPQVYTLPPSRDELTKNQVSLTCLVKGFYPSDIAVLWESFGTEWVSYKTTPPVLDSDGSFFLYSKLTVTKEEWQQGFVFSCSVMHEALHNHYTQKSLSLSPGK

SEQ ID NO: 124 - protein, 217 aa, Artificial Sequence; identical to SEQ ID NO: 27
  source: /note="Description of Artificial Sequence: Synthetic polypeptide"

SEQ ID NO: 125 - protein, 217 aa, Artificial Sequence
  source: /note="Description of Artificial Sequence: Synthetic polypeptide"
APELLGGPSVFLFPPKPKDTLMISRTPEVTCVVVDVSHEDPEVKFNWYVDGVEVHNAKTKPREEQYNSTYRVVSVLTVLHQDWLNGKEYKCKVSNKALPAPIEKTISKAKGQPREPQVYTLPPSRDELTKNQVSLTCLVKGFYPSDIAVWWESLGHVWVNQKTTPPVLDSDGSFFLYSKLTVPKSTWQQGWVFSCSVMHEALHNHYTQKSLSLSPGK

SEQ ID NO: 126 - protein, 217 aa, Artificial Sequence
  source: /note="Description of Artificial Sequence: Synthetic polypeptide"
APELLGGPSVFLFPPKPKDTLMISRTPEVTCVVVDVSHEDPEVKFNWYVDGVEVHNAKTKPREEQYNSTYRVVSVLTVLHQDWLNGKEYKCKVSNKALPAPIEKTISKAKGQPREPQVYTLPPSRDELTKNQVSLTCLVKGFYPSDIAVEWESLGHVWVNQQTTPPVLDSDGSFFLYSKLTVPKSTWQQGWVFSCSVMHEALHNHYTQKSLSLSPGK

SEQ ID NO: 127 - protein, 217 aa, Artificial Sequence
  source: /note="Description of Artificial Sequence: Synthetic polypeptide"
APELLGGPSVFLFPPKPKDTLMISRTPEVTCVVVDVSHEDPEVKFNWYVDGVEVHNAKTKPREEQYNSTYRVVSVLTVLHQDWLNGKEYKCKVSNKALPAPIEKTISKAKGQPREPQVYTLPPSRDELTKNQVSLTCLVKGFYPSDIAVWWESLGHVWVNQQTTPPVLDSDGSFFLYSKLTVPKSTWQQGWVFSCSVMHEALHNHYTQKSLSLSPGK

SEQ ID NO: 128 - protein, 760 aa, Macaca fascicularis
MMDQARSAFSNLFGGEPLSYTRFSLARQVDGDNSHVEMKLGVDEEENTDNNTKANGTKPKRCGGNICYGTIAVIIFFLIGFMIGYLGYCKGVEPKTECERLAGTESPAREEPEEDFPAAPRLYWDDLKRKLSEKLDTTDFTSTIKLLNENLYVPREAGSQKDENLALYIENQFREFKLSKVWRDQHFVKIQVKDSAQNSVIIVDKNGGLVYLVENPGGYVAYSKAATVTGKLVHANFGTKKDFEDLDSPVNGSIVIVRAGKITFAEKVANAESLNAIGVLIYMDQTKFPIVKADLSFFGHAHLGTGDPYTPGFPSFNHTQFPPSQSSGLPNIPVQTISRAAAEKLFGNMEGDCPSDWKTDSTCKMVTSENKSVKLTVSNVLKETKILNIFGVIKGFVEPDHYVVVGAQRDAWGPGAAKSSVGTALLLKLAQMFSDMVLKDGFQPSRSIIFASWSAGDFGSVGATEWLEGYLSSLHLKAFTYINLDKAVLGTSNFKVSASPLLYTLIEKTMQDVKHPVTGRSLYQDSNWASKVEKLTLDNAAFPFLAYSGIPAVSFCFCEDTDYPYLGTTMDTYKELVERIPELNKVARAAAEVAGQFVIKLTHDTELNLDYERYNSQLLLFLRDLNQYRADVKEMGLSLQWLYSARGDFFRATSRLTTDFRNAEKRDKFVMKKLNDRVMRVEYYFLSPYVSPKESPFRHVFWGSGSHTLSALLESLKLRRQNNSAFNETLFRNQLALATWTIQGAANALSGDVWDIDNEF

SEQ ID NO: 129 - protein, 186 aa, Artificial Sequence
  source: /note="Description of Artificial Sequence: Synthetic polypeptide"
MGWSCIILFLVATATGAYAGTSSGLPNIPVQTISRAAAEKLFGNMEGDCPSDWKTDSTCRMVTSESKNVKLTVSNDSAQNSVIIVDKNGRLVYLVENPGGYVAYSKAATVTGKLVHANFGTKKDFEDLYTPVNGSIVIVRAGKITFAEKVANAESLNAIGVLIYMDQTKFPIVNAELSASHHHHHH

SEQ ID NO: 130 - protein, 244 aa, Artificial Sequence
  source: /note="Description of Artificial Sequence: Synthetic polypeptide"
METDTLLLWVLLLWVPGSTGDKTHTCPAPEAAGGPSVFLFPPKPKDTLYITREPEVTCVVVDVSHEDPEVKFNWYVDGVEVHNAKTKPREEQYNSTYRVVSVLTVLHQDWLNGKEYKCKVSNKALGAPIEKTISKAKGQPREPQVYTLPPSRDELTKNQVSLTCLVKGFYPSDIAVEWESLGHVWAVYKTTPPVLDSDGSFFLYSKLTVPKSTWQQGWVFSCSVMHEALHNHYTQKSLSLSPGK

SEQ ID NO: 131 - protein, 11 aa, Artificial Sequence
  source: /note="Description of Artificial Sequence: Synthetic peptide"
EWESFGTEWSS

SEQ ID NO: 132 - protein, 11 aa, Artificial Sequence
  source: /note="Description of Artificial Sequence: Synthetic peptide"
EWESYGTEWAS

SEQ ID NO: 133 - protein, 11 aa, Artificial Sequence
  source: /note="Description of Artificial Sequence: Synthetic peptide"
EWESYGTEWVS

SEQ ID NO: 134 - protein, 11 aa, Artificial Sequence
  source: /note="Description of Artificial Sequence: Synthetic peptide"
EWESYGTEWSS

SEQ ID NO: 135 - protein, 11 aa, Artificial Sequence
  source: /note="Description of Artificial Sequence: Synthetic peptide"
EWESFGTEWAS

SEQ ID NO: 136 - protein, 11 aa, Artificial Sequence
  source: /note="Description of Artificial Sequence: Synthetic peptide"
EWESFGTEWVS

SEQ ID NO: 137 - protein, 11 aa, Artificial Sequence
  source: /note="Description of Artificial Sequence: Synthetic peptide"
WWESFGTEWSS

SEQ ID NO: 138 - protein, 11 aa, Artificial Sequence
  source: /note="Description of Artificial Sequence: Synthetic peptide"
WWESYGTEWAS

SEQ ID NO: 139 - protein, 11 aa, Artificial Sequence
  source: /note="Description of Artificial Sequence: Synthetic peptide"
WWESYGTEWVS

SEQ ID NO: 140 - protein, 11 aa, Artificial Sequence
  source: /note="Description of Artificial Sequence: Synthetic peptide"
WWESYGTEWSS

SEQ ID NO: 141 - protein, 11 aa, Artificial Sequence
  source: /note="Description of Artificial Sequence: Synthetic peptide"
WWESFGTEWAS

SEQ ID NO: 142 - protein, 11 aa, Artificial Sequence
  source: /note="Description of Artificial Sequence: Synthetic peptide"
WWESFGTEWVS

SEQ ID NO: 143 - protein, 11 aa, Artificial Sequence
  source: /note="Description of Artificial Sequence: Synthetic peptide"
EWESFGTEWSN

SEQ ID NO: 144 - protein, 11 aa, Artificial Sequence
  source: /note="Description of Artificial Sequence: Synthetic peptide"
EWESYGTEWAN

SEQ ID NO: 145 - protein, 11 aa, Artificial Sequence
  source: /note="Description of Artificial Sequence: Synthetic peptide"
EWESYGTEWVN

SEQ ID NO: 146 - protein, 11 aa, Artificial Sequence
  source: /note="Description of Artificial Sequence: Synthetic peptide"
EWESYGTEWSN

SEQ ID NO: 147 - protein, 11 aa, Artificial Sequence
  source: /note="Description of Artificial Sequence: Synthetic peptide"
EWESFGTEWAN

SEQ ID NO: 148 - protein, 11 aa, Artificial Sequence
  source: /note="Description of Artificial Sequence: Synthetic peptide"
EWESFGTEWVN

SEQ ID NO: 149 - protein, 11 aa, Artificial Sequence
  source: /note="Description of Artificial Sequence: Synthetic peptide"
WWESFGTEWSN

SEQ ID NO: 150 - protein, 11 aa, Artificial Sequence
  source: /note="Description of Artificial Sequence: Synthetic peptide"
WWESYGTEWAN

SEQ ID NO: 151 - protein, 11 aa, Artificial Sequence
  source: /note="Description of Artificial Sequence: Synthetic peptide"
WWESYGTEWVN

SEQ ID NO: 152 - protein, 11 aa, Artificial Sequence
  source: /note="Description of Artificial Sequence: Synthetic peptide"
WWESYGTEWSN

SEQ ID NO: 153 - protein, 11 aa, Artificial Sequence
  source: /note="Description of Artificial Sequence: Synthetic peptide"
WWESFGTEWAN

SEQ ID NO: 154 - protein, 11 aa, Artificial Sequence
  source: /note="Description of Artificial Sequence: Synthetic peptide"
WWESFGTEWVN

SEQ ID NO: 155 - protein, 11 aa, Artificial Sequence
  source: /note="Description of Artificial Sequence: Synthetic peptide"
LWESFGTEWSS

SEQ ID NO: 156 - protein, 11 aa, Artificial Sequence
  source: /note="Description of Artificial Sequence: Synthetic peptide"
LWESYGTEWAS

SEQ ID NO: 157 - protein, 11 aa, Artificial Sequence
  source: /note="Description of Artificial Sequence: Synthetic peptide"
LWESYGTEWVS

SEQ ID NO: 158 - protein, 11 aa, Artificial Sequence
  source: /note="Description of Artificial Sequence: Synthetic peptide"
LWESYGTEWSS

SEQ ID NO: 159 - protein, 11 aa, Artificial Sequence
  source: /note="Description of Artificial Sequence: Synthetic peptide"
LWESFGTEWAS

SEQ ID NO: 160 - protein, 11 aa, Artificial Sequence
  source: /note="Description of Artificial Sequence: Synthetic peptide"
LWESFGTEWVS

SEQ ID NO: 161 - protein, 11 aa, Artificial Sequence
  source: /note="Description of Artificial Sequence: Synthetic peptide"
WWESLGHVWAV

SEQ ID NO: 162 - protein, 11 aa, Artificial Sequence
  source: /note="Description of Artificial Sequence: Synthetic peptide"
EWESLGHVWAV

SEQ ID NO: 163 - protein, 11 aa, Artificial Sequence
  source: /note="Description of Artificial Sequence: Synthetic peptide"
LWESLGHVWAV

SEQ ID NO: 164 - protein, 11 aa, Artificial Sequence
  source: /note="Description of Artificial Sequence: Synthetic peptide"
YWESLGHVWAV

SEQ ID NO: 165 - protein, 11 aa, Artificial Sequence
  source: /note="Description of Artificial Sequence: Synthetic peptide"
EWESLGLVWVF

SEQ ID NO: 166 - protein, 11 aa, Artificial Sequence
  source: /note="Description of Artificial Sequence: Synthetic peptide"
WWESLGHVWVN

SEQ ID NO: 167 - protein, 11 aa, Artificial Sequence
  source: /note="Description of Artificial Sequence: Synthetic peptide"
EWESLGHVWVN

SEQ ID NO: 168 - protein, 9 aa, Artificial Sequence
  source: /note="Description of Artificial Sequence: Synthetic peptide"
TKEEWQQGF

SEQ ID NO: 169 - protein, 9 aa, Artificial Sequence
  source: /note="Description of Artificial Sequence: Synthetic peptide"
SKEEWQQGF

SEQ ID NO: 170 - protein, 9 aa, Artificial Sequence
  source: /note="Description of Artificial Sequence: Synthetic peptide"
PKTSWQQGW

SEQ ID NO: 171 - protein, 9 aa, Artificial Sequence
  source: /note="Description of Artificial Sequence: Synthetic peptide"
TREEWQQGF

SEQ ID NO: 172 - protein, 9 aa, Artificial Sequence
  source: /note="Description of Artificial Sequence: Synthetic peptide"
TPEEWQQGF

SEQ ID NO: 173 - protein, 9 aa, Artificial Sequence
  source: /note="Description of Artificial Sequence: Synthetic peptide"
TGEEWQQGF

SEQ ID NO: 174 - protein, 12 aa, Artificial Sequence
  source: /note="Description of Artificial Sequence: Synthetic peptide"
  MOD_RES (3)..(3): Any amino acid
  MOD_RES (5)..(6): Any amino acid
  MOD_RES (11)..(11): Any amino acid
TVXKXXWQQGXV

SEQ ID NO: 175 - protein, 217 aa, Artificial Sequence
  source: /note="Description of Artificial Sequence: Synthetic polypeptide"
APEAAGGPSVFLFPPKPKDTLYITREPEVTCVVVDVSHEDPEVKFNWYVDGVEVHNAKTKPREEQYNSTYRVVSVLTVLHQDWLNGKEYKCKVSNKALGAPIEKTISKAKGQPREPQVYTLPPSRDELTKNQVSLTCLVKGFYPSDIAVEWESYGTEWSSYKTTPPVLDSDGSFFLYSKLTVTKEEWQQGFVFSCSVMHEALHNHYTQKSLSLSPGK

SEQ ID NO: 176 - protein, 217 aa, Artificial Sequence
  source: /note="Description of Artificial Sequence: Synthetic polypeptide"
APEAAGGPSVFLFPPKPKDTLYITREPEVTCVVVDVSHEDPEVKFNWYVDGVEVHNAKTKPREEQYNSTYRVVSVLTVLHQDWLNGKEYKCKVSNKALGAPIEKTISKAKGQPREPQVYTLPPSRDELTKNQVSLTCLVKGFYPSDIAVEWESFGTEWSSYKTTPPVLDSDGSFFLYSKLTVTKEEWQQGFVFSCSVMHEALHNHYTQKSLSLSPGK

SEQ ID NO: 177 - protein, 217 aa, Artificial Sequence
  source: /note="Description of Artificial Sequence: Synthetic polypeptide"
APELLGGPSVFLFPPKPKDTLMISRTPEVTCVVVDVSHEDPEVKFNWYVDGVEVHNAKTKPREEQYNSTYRVVSVLTVLHQDWLNGKEYKCKVSNKALPAPIEKTISKAKGQPREPQVYTLPPSRDELTKNQVSLWCLVKGFYPSDIAVEWESFGTEWSSYKTTPPVLDSDGSFFLYSKLTVTKEEWQQGFVFSCSVMHEALHNHYTQKSLSLSPGK

SEQ ID NO: 178 - protein, 217 aa, Artificial Sequence
  source: /note="Description of Artificial Sequence: Synthetic polypeptide"
APEAAGGPSVFLFPPKPKDTLMISRTPEVTCVVVDVSHEDPEVKFNWYVDGVEVHNAKTKPREEQYNSTYRVVSVLTVLHQDWLNGKEYKCKVSNKALPAPIEKTISKAKGQPREPQVYTLPPSRDELTKNQVSLWCLVKGFYPSDIAVEWESFGTEWSSYKTTPPVLDSDGSFFLYSKLTVTKEEWQQGFVFSCSVMHEALHNHYTQKSLSLSPGK

SEQ ID NO: 179 - protein, 217 aa, Artificial Sequence
  source: /note="Description of Artificial Sequence: Synthetic polypeptide"
APEAAGGPSVFLFPPKPKDTLMISRTPEVTCVVVDVSHEDPEVKFNWYVDGVEVHNAKTKPREEQYNSTYRVVSVLTVLHQDWLNGKEYKCKVSNKALGAPIEKTISKAKGQPREPQVYTLPPSRDELTKNQVSLWCLVKGFYPSDIAVEWESFGTEWSSYKTTPPVLDSDGSFFLYSKLTVTKEEWQQGFVFSCSVMHEALHNHYTQKSLSLSPGK

SEQ ID NO: 180 - protein, 217 aa, Artificial Sequence
  source: /note="Description of Artificial Sequence: Synthetic polypeptide"
APELLGGPSVFLFPPKPKDTLYITREPEVTCVVVDVSHEDPEVKFNWYVDGVEVHNAKTKPREEQYNSTYRVVSVLTVLHQDWLNGKEYKCKVSNKALPAPIEKTISKAKGQPREPQVYTLPPSRDELTKNQVSLWCLVKGFYPSDIAVEWESFGTEWSSYKTTPPVLDSDGSFFLYSKLTVTKEEWQQGFVFSCSVMHEALHNHYTQKSLSLSPGK

SEQ ID NO: 181 - protein, 217 aa, Artificial Sequence
  source: /note="Description of Artificial Sequence: Synthetic polypeptide"
APEAAGGPSVFLFPPKPKDTLYITREPEVTCVVVDVSHEDPEVKFNWYVDGVEVHNAKTKPREEQYNSTYRVVSVLTVLHQDWLNGKEYKCKVSNKALPAPIEKTISKAKGQPREPQVYTLPPSRDELTKNQVSLWCLVKGFYPSDIAVEWESFGTEWSSYKTTPPVLDSDGSFFLYSKLTVTKEEWQQGFVFSCSVMHEALHNHYTQKSLSLSPGK

SEQ ID NO: 182 - protein, 217 aa, Artificial Sequence
  source: /note="Description of Artificial Sequence: Synthetic polypeptide"
APEAAGGPSVFLFPPKPKDTLYITREPEVTCVVVDVSHEDPEVKFNWYVDGVEVHNAKTKPREEQYNSTYRVVSVLTVLHQDWLNGKEYKCKVSNKALGAPIEKTISKAKGQPREPQVYTLPPSRDELTKNQVSLWCLVKGFYPSDIAVEWESFGTEWSSYKTTPPVLDSDGSFFLYSKLTVTKEEWQQGFVFSCSVMHEALHNHYTQKSLSLSPGK

SEQ ID NO: 183 - protein, 217 aa, Artificial Sequence
  source: /note="Description of Artificial Sequence: Synthetic polypeptide"
APELLGGPSVFLFPPKPKDTLMISRTPEVTCVVVDVSHEDPEVKFNWYVDGVEVHNAKTKPREEQYNSTYRVVSVLTVLHQDWLNGKEYKCKVSNKALPAPIEKTISKAKGQPREPQVYTLPPSRDELTKNQVSLSCAVKGFYPSDIAVEWESFGTEWSSYKTTPPVLDSDGSFFLVSKLTVTKEEWQQGFVFSCSVMHEALHNHYTQKSLSLSPGK

SEQ ID NO: 184 - protein, 217 aa, Artificial Sequence
  source: /note="Description of Artificial Sequence: Synthetic polypeptide"
APEAAGGPSVFLFPPKPKDTLMISRTPEVTCVVVDVSHEDPEVKFNWYVDGVEVHNAKTKPREEQYNSTYRVVSVLTVLHQDWLNGKEYKCKVSNKALPAPIEKTISKAKGQPREPQVYTLPPSRDELTKNQVSLSCAVKGFYPSDIAVEWESFGTEWSSYKTTPPVLDSDGSFFLVSKLTVTKEEWQQGFVFSCSVMHEALHNHYTQKSLSLSPGK

SEQ ID NO: 185 - protein, 217 aa, Artificial Sequence
  source: /note="Description of Artificial Sequence: Synthetic polypeptide"
APEAAGGPSVFLFPPKPKDTLMISRTPEVTCVVVDVSHEDPEVKFNWYVDGVEVHNAKTKPREEQYNSTYRVVSVLTVLHQDWLNGKEYKCKVSNKALGAPIEKTISKAKGQPREPQVYTLPPSRDELTKNQVSLSCAVKGFYPSDIAVEWESFGTEWSSYKTTPPVLDSDGSFFLVSKLTVTKEEWQQGFVFSCSVMHEALHNHYTQKSLSLSPGK

SEQ ID NO: 186 - protein, 217 aa, Artificial Sequence
  source: /note="Description of Artificial Sequence: Synthetic polypeptide"
APELLGGPSVFLFPPKPKDTLYITREPEVTCVVVDVSHEDPEVKFNWYVDGVEVHNAKTKPREEQYNSTYRVVSVLTVLHQDWLNGKEYKCKVSNKALPAPIEKTISKAKGQPREPQVYTLPPSRDELTKNQVSLSCAVKGFYPSDIAVEWESFGTEWSSYKTTPPVLDSDGSFFLVSKLTVTKEEWQQGFVFSCSVMHEALHNHYTQKSLSLSPGK

SEQ ID NO: 187 - protein, 217 aa, Artificial Sequence
  source: /note="Description of Artificial Sequence: Synthetic polypeptide"
APEAAGGPSVFLFPPKPKDTLYITREPEVTCVVVDVSHEDPEVKFNWYVDGVEVHNAKTKPREEQYNSTYRVVSVLTVLHQDWLNGKEYKCKVSNKALPAPIEKTISKAKGQPREPQVYTLPPSRDELTKNQVSLSCAVKGFYPSDIAVEWESFGTEWSSYKTTPPVLDSDGSFFLVSKLTVTKEEWQQGFVFSCSVMHEALHNHYTQKSLSLSPGK

SEQ ID NO: 188 - protein, 217 aa, Artificial Sequence
  source: /note="Description of Artificial Sequence: Synthetic polypeptide"
APEAAGGPSVFLFPPKPKDTLYITREPEVTCVVVDVSHEDPEVKFNWYVDGVEVHNAKTKPREEQYNSTYRVVSVLTVLHQDWLNGKEYKCKVSNKALGAPIEKTISKAKGQPREPQVYTLPPSRDELTKNQVSLSCAVKGFYPSDIAVEWESFGTEWSSYKTTPPVLDSDGSFFLVSKLTVTKEEWQQGFVFSCSVMHEALHNHYTQKSLSLSPGK

SEQ ID NO: 189 - protein, 217 aa, Artificial Sequence
  source: /note="Description of Artificial Sequence: Synthetic polypeptide"
APELLGGPSVFLFPPKPKDTLMISRTPEVTCVVVDVSHEDPEVKFNWYVDGVEVHNAKTKPREEQYNSTYRVVSVLTVLHQDWLNGKEYKCKVSNKALPAPIEKTISKAKGQPREPQVYTLPPSRDELTKNQVSLWCLVKGFYPSDIAVEWESYGTEWANYKTTPPVLDSDGSFFLYSKLTVTKEEWQQGFVFSCSVMHEALHNHYTQKSLSLSPGK

SEQ ID NO: 190 - protein, 217 aa, Artificial Sequence
  source: /note="Description of Artificial Sequence: Synthetic polypeptide"
APEAAGGPSVFLFPPKPKDTLMISRTPEVTCVVVDVSHEDPEVKFNWYVDGVEVHNAKTKPREEQYNSTYRVVSVLTVLHQDWLNGKEYKCKVSNKALPAPIEKTISKAKGQPREPQVYTLPPSRDELTKNQVSLWCLVKGFYPSDIAVEWESYGTEWANYKTTPPVLDSDGSFFLYSKLTVTKEEWQQGFVFSCSVMHEALHNHYTQKSLSLSPGK

SEQ ID NO: 191 - protein, 217 aa, Artificial Sequence
  source: /note="Description of Artificial Sequence: Synthetic polypeptide"
APEAAGGPSVFLFPPKPKDTLMISRTPEVTCVVVDVSHEDPEVKFNWYVDGVEVHNAKTKPREEQYNSTYRVVSVLTVLHQDWLNGKEYKCKVSNKALGAPIEKTISKAKGQPREPQVYTLPPSRDELTKNQVSLWCLVKGFYPSDIAVEWESYGTEWANYKTTPPVLDSDGSFFLYSKLTVTKEEWQQGFVFSCSVMHEALHNHYTQKSLSLSPGK

SEQ ID NO: 192 - protein, 217 aa, Artificial Sequence
  source: /note="Description of Artificial Sequence: Synthetic polypeptide"
APELLGGPSVFLFPPKPKDTLYITREPEVTCVVVDVSHEDPEVKFNWYVDGVEVHNAKTKPREEQYNSTYRVVSVLTVLHQDWLNGKEYKCKVSNKALPAPIEKTISKAKGQPREPQVYTLPPSRDELTKNQVSLWCLVKGFYPSDIAVEWESYGTEWANYKTTPPVLDSDGSFFLYSKLTVTKEEWQQGFVFSCSVMHEALHNHYTQKSLSLSPGK

SEQ ID NO: 193 - protein, 217 aa, Artificial Sequence
  source: /note="Description of Artificial Sequence: Synthetic polypeptide"
APEAAGGPSVFLFPPKPKDTLYITREPEVTCVVVDVSHEDPEVKFNWYVDGVEVHNAKTKPREEQYNSTYRVVSVLTVLHQDWLNGKEYKCKVSNKALPAPIEKTISKAKGQPREPQVYTLPPSRDELTKNQVSLWCLVKGFYPSDIAVEWESYGTEWANYKTTPPVLDSDGSFFLYSKLTVTKEEWQQGFVFSCSVMHEALHNHYTQKSLSLSPGK

SEQ ID NO: 194 - protein, 217 aa, Artificial Sequence
  source: /note="Description of Artificial Sequence: Synthetic polypeptide"
APEAAGGPSVFLFPPKPKDTLYITREPEVTCVVVDVSHEDPEVKFNWYVDGVEVHNAKTKPREEQYNSTYRVVSVLTVLHQDWLNGKEYKCKVSNKALGAPIEKTISKAKGQPREPQVYTLPPSRDELTKNQVSLWCLVKGFYPSDIAVEWESYGTEWANYKTTPPVLDSDGSFFLYSKLTVTKEEWQQGFVFSCSVMHEALHNHYTQKSLSLSPGK

SEQ ID NO: 195 - protein, 217 aa, Artificial Sequence
  source: /note="Description of Artificial Sequence: Synthetic polypeptide"
APELLGGPSVFLFPPKPKDTLMISRTPEVTCVVVDVSHEDPEVKFNWYVDGVEVHNAKTKPREEQYNSTYRVVSVLTVLHQDWLNGKEYKCKVSNKALPAPIEKTISKAKGQPREPQVYTLPPSRDELTKNQVSLSCAVKGFYPSDIAVEWESYGTEWANYKTTPPVLDSDGSFFLVSKLTVTKEEWQQGFVFSCSVMHEALHNHYTQKSLSLSPGK

SEQ ID NO: 196 - protein, 217 aa, Artificial Sequence
  source: /note="Description of Artificial Sequence: Synthetic polypeptide"
APEAAGGPSVFLFPPKPKDTLMISRTPEVTCVVVDVSHEDPEVKFNWYVDGVEVHNAKTKPREEQYNSTYRVVSVLTVLHQDWLNGKEYKCKVSNKALPAPIEKTISKAKGQPREPQVYTLPPSRDELTKNQVSLSCAVKGFYPSDIAVEWESYGTEWANYKTTPPVLDSDGSFFLVSKLTVTKEEWQQGFVFSCSVMHEALHNHYTQKSLSLSPGK

SEQ ID NO: 197 - protein, 217 aa, Artificial Sequence
  source: /note="Description of Artificial Sequence: Synthetic polypeptide"
APEAAGGPSVFLFPPKPKDTLMISRTPEVTCVVVDVSHEDPEVKFNWYVDGVEVHNAKTKPREEQYNSTYRVVSVLTVLHQDWLNGKEYKCKVSNKALGAPIEKTISKAKGQPREPQVYTLPPSRDELTKNQVSLSCAVKGFYPSDIAVEWESYGTEWANYKTTPPVLDSDGSFFLVSKLTVTKEEWQQGFVFSCSVMHEALHNHYTQKSLSLSPGK

SEQ ID NO: 198 - protein, 217 aa, Artificial Sequence
  source: /note="Description of Artificial Sequence: Synthetic polypeptide"
APELLGGPSVFLFPPKPKDTLYITREPEVTCVVVDVSHEDPEVKFNWYVDGVEVHNAKTKPREEQYNSTYRVVSVLTVLHQDWLNGKEYKCKVSNKALPAPIEKTISKAKGQPREPQVYTLPPSRDELTKNQVSLSCAVKGFYPSDIAVEWESYGTEWANYKTTPPVLDSDGSFFLVSKLTVTKEEWQQGFVFSCSVMHEALHNHYTQKSLSLSPGK

SEQ ID NO: 199 - protein, 217 aa, Artificial Sequence
  source: /note="Description of Artificial Sequence: Synthetic polypeptide"
APEAAGGPSVFLFPPKPKDTLYITREPEVTCVVVDVSHEDPEVKFNWYVDGVEVHNAKTKPREEQYNSTYRVVSVLTVLHQDWLNGKEYKCKVSNKALPAPIEKTISKAKGQPREPQVYTLPPSRDELTKNQVSLSCAVKGFYPSDIAVEWESYGTEWANYKTTPPVLDSDGSFFLVSKLTVTKEEWQQGFVFSCSVMHEALHNHYTQKSLSLSPGK

SEQ ID NO: 200 - protein, 217 aa, Artificial Sequence
  source: /note="Description of Artificial Sequence: Synthetic polypeptide"
APEAAGGPSVFLFPPKPKDTLYITREPEVTCVVVDVSHEDPEVKFNWYVDGVEVHNAKTKPREEQYNSTYRVVSVLTVLHQDWLNGKEYKCKVSNKALGAPIEKTISKAKGQPREPQVYTLPPSRDELTKNQVSLSCAVKGFYPSDIAVEWESYGTEWANYKTTPPVLDSDGSFFLVSKLTVTKEEWQQGFVFSCSVMHEALHNHYTQKSLSLSPGK

SEQ ID NO: 201 - protein, 217 aa, Artificial Sequence
  source: /note="Description of Artificial Sequence: Synthetic polypeptide"
APELLGGPSVFLFPPKPKDTLMISRTPEVTCVVVDVSHEDPEVKFNWYVDGVEVHNAKTKPREEQYNSTYRVVSVLTVLHQDWLNGKEYKCKVSNKALPAPIEKTISKAKGQPREPQVYTLPPSRDELTKNQVSLWCLVKGFYPSDIAVEWESYGTEWVNYKTTPPVLDSDGSFFLYSKLTVTKEEWQQGFVFSCSVMHEALHNHYTQKSLSLSPGK

SEQ ID NO: 202 - protein, 217 aa, Artificial Sequence
  source: /note="Description of Artificial Sequence: Synthetic polypeptide"
APEAAGGPSVFLFPPKPKDTLMISRTPEVTCVVVDVSHEDPEVKFNWYVDGVEVHNAKTKPREEQYNSTYRVVSVLTVLHQDWLNGKEYKCKVSNKALPAPIEKTISKAKGQPREPQVYTLPPSRDELTKNQVSLWCLVKGFYPSDIAVEWESYGTEWVNYKTTPPVLDSDGSFFLYSKLTVTKEEWQQGFVFSCSVMHEALHNHYTQKSLSLSPGK

SEQ ID NO: 203 - protein, 217 aa, Artificial Sequence
  source: /note="Description of Artificial Sequence: Synthetic polypeptide"
APEAAGGPSVFLFPPKPKDTLMISRTPEVTCVVVDVSHEDPEVKFNWYVDGVEVHNAKTKPREEQYNSTYRVVSVLTVLHQDWLNGKEYKCKVSNKALGAPIEKTISKAKGQPREPQVYTLPPSRDELTKNQVSLWCLVKGFYPSDIAVEWESYGTEWVNYKTTPPVLDSDGSFFLYSKLTVTKEEWQQGFVFSCSVMHEALHNHYTQKSLSLSPGK

SEQ ID NO: 204 - protein, 217 aa, Artificial Sequence
  source: /note="Description of Artificial Sequence: Synthetic polypeptide"
APELLGGPSVFLFPPKPKDTLYITREPEVTCVVVDVSHEDPEVKFNWYVDGVEVHNAKTKPREEQYNSTYRVVSVLTVLHQDWLNGKEYKCKVSNKALPAPIEKTISKAKGQPREPQVYTLPPSRDELTKNQVSLWCLVKGFYPSDIAVEWESYGTEWVNYKTTPPVLDSDGSFFLYSKLTVTKEEWQQGFVFSCSVMHEALHNHYTQKSLSLSPGK

SEQ ID NO: 205 - protein, 217 aa, Artificial Sequence
  source: /note="Description of Artificial Sequence: Synthetic polypeptide"
APEAAGGPSVFLFPPKPKDTLYITREPEVTCVVVDVSHEDPEVKFNWYVDGVEVHNAKTKPREEQYNSTYRVVSVLTVLHQDWLNGKEYKCKVSNKALPAPIEKTISKAKGQPREPQVYTLPPSRDELTKNQVSLWCLVKGFYPSDIAVEWESYGTEWVNYKTTPPVLDSDGSFFLYSKLTVTKEEWQQGFVFSCSVMHEALHNHYTQKSLSLSPGK

SEQ ID NO: 206 - protein, 217 aa, Artificial Sequence
  source: /note="Description of Artificial Sequence: Synthetic polypeptide"
APEAAGGPSVFLFPPKPKDTLYITREPEVTCVVVDVSHEDPEVKFNWYVDGVEVHNAKTKPREEQYNSTYRVVSVLTVLHQDWLNGKEYKCKVSNKALGAPIEKTISKAKGQPREPQVYTLPPSRDELTKNQVSLWCLVKGFYPSDIAVEWESYGTEWVNYKTTPPVLDSDGSFFLYSKLTVTKEEWQQGFVFSCSVMHEALHNHYTQKSLSLSPGK

SEQ ID NO: 207 - protein, 217 aa, Artificial Sequence
  source: /note="Description of Artificial Sequence: Synthetic polypeptide"
APELLGGPSVFLFPPKPKDTLMISRTPEVTCVVVDVSHEDPEVKFNWYVDGVEVHNAKTKPREEQYNSTYRVVSVLTVLHQDWLNGKEYKCKVSNKALPAPIEKTISKAKGQPREPQVYTLPPSRDELTKNQVSLSCAVKGFYPSDIAVEWESYGTEWVNYKTTPPVLDSDGSFFLVSKLTVTKEEWQQGFVFSCSVMHEALHNHYTQKSLSLSPGK

SEQ ID NO: 208 - protein, 217 aa, Artificial Sequence
  source: /note="Description of Artificial Sequence: Synthetic polypeptide"
APEAAGGPSVFLFPPKPKDTLMISRTPEVTCVVVDVSHEDPEVKFNWYVDGVEVHNAKTKPREEQYNSTYRVVSVLTVLHQDWLNGKEYKCKVSNKALPAPIEKTISKAKGQPREPQVYTLPPSRDELTKNQVSLSCAVKGFYPSDIAVEWESYGTEWVNYKTTPPVLDSDGSFFLVSKLTVTKEEWQQGFVFSCSVMHEALHNHYTQKSLSLSPGK

SEQ ID NO: 209 - protein, 217 aa, Artificial Sequence
  source: /note="Description of Artificial Sequence: Synthetic polypeptide"
APEAAGGPSVFLFPPKPKDTLMISRTPEVTCVVVDVSHEDPEVKFNWYVDGVEVHNAKTKPREEQYNSTYRVVSVLTVLHQDWLNGKEYKCKVSNKALGAPIEKTISKAKGQPREPQVYTLPPSRDELTKNQVSLSCAVKGFYPSDIAVEWESYGTEWVNYKTTPPVLDSDGSFFLVSKLTVTKEEWQQGFVFSCSVMHEALHNHYTQKSLSLSPGK

SEQ ID NO: 210 - protein, 217 aa, Artificial Sequence
  source: /note="Description of Artificial Sequence: Synthetic polypeptide"
APELLGGPSVFLFPPKPKDTLYITREPEVTCVVVDVSHEDPEVKFNWYVDGVEVHNAKTKPREEQYNSTYRVVSVLTVLHQDWLNGKEYKCKVSNKALPAPIEKTISKAKGQPREPQVYTLPPSRDELTKNQVSLSCAVKGFYPSDIAVEWESYGTEWVNYKTTPPVLDSDGSFFLVSKLTVTKEEWQQGFVFSCSVMHEALHNHYTQKSLSLSPGK

SEQ ID NO: 211 - protein, 217 aa, Artificial Sequence
  source: /note="Description of Artificial Sequence: Synthetic polypeptide"
APEAAGGPSVFLFPPKPKDTLYITREPEVTCVVVDVSHEDPEVKFNWYVDGVEVHNAKTKPREEQYNSTYRVVSVLTVLHQDWLNGKEYKCKVSNKALPAPIEKTISKAKGQPREPQVYTLPPSRDELTKNQVSLSCAVKGFYPSDIAVEWESYGTEWVNYKTTPPVLDSDGSFFLVSKLTVTKEEWQQGFVFSCSVMHEALHNHYTQKSLSLSPGK

SEQ ID NO: 212 - protein, 217 aa, Artificial Sequence
  source: /note="Description of Artificial Sequence: Synthetic polypeptide"
APEAAGGPSVFLFPPKPKDTLYITREPEVTCVVVDVSHEDPEVKFNWYVDGVEVHNAKTKPREEQYNSTYRVVSVLTVLHQDWLNGKEYKCKVSNKALGAPIEKTISKAKGQPREPQVYTLPPSRDELTKNQVSLSCAVKGFYPSDIAVEWESYGTEWVNYKTTPPVLDSDGSFFLVSKLTVTKEEWQQGFVFSCSVMHEALHNHYTQKSLSLSPGK

SEQ ID NO: 213 - protein, 217 aa, Artificial Sequence
  source: /note="Description of Artificial Sequence: Synthetic polypeptide"
APELLGGPSVFLFPPKPKDTLMISRTPEVTCVVVDVSHEDPEVKFNWYVDGVEVHNAKTKPREEQYNSTYRVVSVLTVLHQDWLNGKEYKCKVSNKALPAPIEKTISKAKGQPREPQVYTLPPSRDELTKNQVSLWCLVKGFYPSDIAVEWESYGTEWSNYKTTPPVLDSDGSFFLYSKLTVSKEEWQQGFVFSCSVMHEALHNHYTQKSLSLSPGK

SEQ ID NO: 214 - protein, 217 aa, Artificial Sequence
  source: /note="Description of Artificial Sequence: Synthetic polypeptide"
APEAAGGPSVFLFPPKPKDTLMISRTPEVTCVVVDVSHEDPEVKFNWYVDGVEVHNAKTKPREEQYNSTYRVVSVLTVLHQDWLNGKEYKCKVSNKALPAPIEKTISKAKGQPREPQVYTLPPSRDELTKNQVSLWCLVKGFYPSDIAVEWESYGTEWSNYKTTPPVLDSDGSFFLYSKLTVSKEEWQQGFVFSCSVMHEALHNHYTQKSLSLSPGK

SEQ ID NO: 215 - protein, 217 aa, Artificial Sequence
  source: /note="Description of Artificial Sequence: Synthetic polypeptide"
APEAAGGPSVFLFPPKPKDTLMISRTPEVTCVVVDVSHEDPEVKFNWYVDGVEVHNAKTKPREEQYNSTYRVVSVLTVLHQDWLNGKEYKCKVSNKALGAPIEKTISKAKGQPREPQVYTLPPSRDELTKNQVSLWCLVKGFYPSDIAVEWESYGTEWSNYKTTPPVLDSDGSFFLYSKLTVSKEEWQQGFVFSCSVMHEALHNHYTQKSLSLSPGK

SEQ ID NO: 216 - protein, 217 aa, Artificial Sequence
  source: /note="Description of Artificial Sequence: Synthetic polypeptide"
APELLGGPSVFLFPPKPKDTLYITREPEVTCVVVDVSHEDPEVKFNWYVDGVEVHNAKTKPREEQYNSTYRVVSVLTVLHQDWLNGKEYKCKVSNKALPAPIEKTISKAKGQPREPQVYTLPPSRDELTKNQVSLWCLVKGFYPSDIAVEWESYGTEWSNYKTTPPVLDSDGSFFLYSKLTVSKEEWQQGFVFSCSVMHEALHNHYTQKSLSLSPGK

SEQ ID NO: 217 - protein, 217 aa, Artificial Sequence
  source: /note="Description of Artificial Sequence: Synthetic polypeptide"
APEAAGGPSVFLFPPKPKDTLYITREPEVTCVVVDVSHEDPEVKFNWYVDGVEVHNAKTKPREEQYNSTYRVVSVLTVLHQDWLNGKEYKCKVSNKALPAPIEKTISKAKGQPREPQVYTLPPSRDELTKNQVSLWCLVKGFYPSDIAVEWESYGTEWSNYKTTPPVLDSDGSFFLYSKLTVSKEEWQQGFVFSCSVMHEALHNHYTQKSLSLSPGK

SEQ ID NO: 218 - protein, 217 aa, Artificial Sequence
  source: /note="Description of Artificial Sequence: Synthetic polypeptide"
APEAAGGPSVFLFPPKPKDTLYITREPEVTCVVVDVSHEDPEVKFNWYVDGVEVHNAKTKPREEQYNSTYRVVSVLTVLHQDWLNGKEYKCKVSNKALGAPIEKTISKAKGQPREPQVYTLPPSRDELTKNQVSLWCLVKGFYPSDIAVEWESYGTEWSNYKTTPPVLDSDGSFFLYSKLTVSKEEWQQGFVFSCSVMHEALHNHYTQKSLSLSPGK

SEQ ID NO: 219 - protein, 217 aa, Artificial Sequence
  source: /note="Description of Artificial Sequence: Synthetic polypeptide"
APELLGGPSVFLFPPKPKDTLMISRTPEVTCVVVDVSHEDPEVKFNWYVDGVEVHNAKTKPREEQYNSTYRVVSVLTVLHQDWLNGKEYKCKVSNKALPAPIEKTISKAKGQPREPQVYTLPPSRDELTKNQVSLSCAVKGFYPSDIAVEWESYGTEWSNYKTTPPVLDSDGSFFLVSKLTVSKEEWQQGFVFSCSVMHEALHNHYTQKSLSLSPGK

SEQ ID NO: 220 - protein, 217 aa, Artificial Sequence
  source: /note="Description of Artificial Sequence: Synthetic polypeptide"
APEAAGGPSVFLFPPKPKDTLMISRTPEVTCVVVDVSHEDPEVKFNWYVDGVEVHNAKTKPREEQYNSTYRVVSVLTVLHQDWLNGKEYKCKVSNKALPAPIEKTISKAKGQPREPQVYTLPPSRDELTKNQVSLSCAVKGFYPSDIAVEWESYGTEWSNYKTTPPVLDSDGSFFLVSKLTVSKEEWQQGFVFSCSVMHEALHNHYTQKSLSLSPGK

SEQ ID NO: 221 - protein, 217 aa, Artificial Sequence
  source: /note="Description of Artificial Sequence: Synthetic polypeptide"
APEAAGGPSVFLFPPKPKDTLMISRTPEVTCVVVDVSHEDPEVKFNWYVDGVEVHNAKTKPREEQYNSTYRVVSVLTVLHQDWLNGKEYKCKVSNKALGAPIEKTISKAKGQPREPQVYTLPPSRDELTKNQVSLSCAVKGFYPSDIAVEWESYGTEWSNYKTTPPVLDSDGSFFLVSKLTVSKEEWQQGFVFSCSVMHEALHNHYTQKSLSLSPGK

SEQ ID NO: 222 - protein, 217 aa, Artificial Sequence
  source: /note="Description of Artificial Sequence: Synthetic polypeptide"
APELLGGPSVFLFPPKPKDTLYITREPEVTCVVVDVSHEDPEVKFNWYVDGVEVHNAKTKPREEQYNSTYRVVSVLTVLHQDWLNGKEYKCKVSNKALPAPIEKTISKAKGQPREPQVYTLPPSRDELTKNQVSLSCAVKGFYPSDIAVEWESYGTEWSNYKTTPPVLDSDGSFFLVSKLTVSKEEWQQGFVFSCSVMHEALHNHYTQKSLSLSPGK

SEQ ID NO: 223 - protein, 217 aa, Artificial Sequence
  source: /note="Description of Artificial Sequence: Synthetic polypeptide"
APEAAGGPSVFLFPPKPKDTLYITREPEVTCVVVDVSHEDPEVKFNWYVDGVEVHNAKTKPREEQYNSTYRVVSVLTVLHQDWLNGKEYKCKVSNKALPAPIEKTISKAKGQPREPQVYTLPPSRDELTKNQVSLSCAVKGFYPSDIAVEWESYGTEWSNYKTTPPVLDSDGSFFLVSKLTVSKEEWQQGFVFSCSVMHEALHNHYTQKSLSLSPGK

SEQ ID NO: 224 - protein, 217 aa, Artificial Sequence
  source: /note="Description of Artificial Sequence: Synthetic polypeptide"
APEAAGGPSVFLFPPKPKDTLYITREPEVTCVVVDVSHEDPEVKFNWYVDGVEVHNAKTKPREEQYNSTYRVVSVLTVLHQDWLNGKEYKCKVSNKALGAPIEKTISKAKGQPREPQVYTLPPSRDELTKNQVSLSCAVKGFYPSDIAVEWESYGTEWSNYKTTPPVLDSDGSFFLVSKLTVSKEEWQQGFVFSCSVMHEALHNHYTQKSLSLSPGK

SEQ ID NO: 225 - protein, 217 aa, Artificial Sequence
  source: /note="Description of Artificial Sequence: Synthetic polypeptide"
APELLGGPSVFLFPPKPKDTLMISRTPEVTCVVVDVSHEDPEVKFNWYVDGVEVHNAKTKPREEQYNSTYRVVSVLTVLHQDWLNGKEYKCKVSNKALPAPIEKTISKAKGQPREPQVYTLPPSRDELTKNQVSLWCLVKGFYPSDIAVLWESYGTEWASYKTTPPVLDSDGSFFLYSKLTVTKEEWQQGFVFSCSVMHEALHNHYTQKSLSLSPGK

SEQ ID NO: 226 - protein, 217 aa, Artificial Sequence
  source: /note="Description of Artificial Sequence: Synthetic polypeptide"
APEAAGGPSVFLFPPKPKDTLMISRTPEVTCVVVDVSHEDPEVKFNWYVDGVEVHNAKTKPREEQYNSTYRVVSVLTVLHQDWLNGKEYKCKVSNKALPAPIEKTISKAKGQPREPQVYTLPPSRDELTKNQVSLWCLVKGFYPSDIAVLWESYGTEWASYKTTPPVLDSDGSFFLYSKLTVTKEEWQQGFVFSCSVMHEALHNHYTQKSLSLSPGK

SEQ ID NO: 227 - protein, 217 aa, Artificial Sequence
  source: /note="Description of Artificial Sequence: Synthetic polypeptide"
APEAAGGPSVFLFPPKPKDTLMISRTPEVTCVVVDVSHEDPEVKFNWYVDGVEVHNAKTKPREEQYNSTYRVVSVLTVLHQDWLNGKEYKCKVSNKALGAPIEKTISKAKGQPREPQVYTLPPSRDELTKNQVSLWCLVKGFYPSDIAVLWESYGTEWASYKTTPPVLDSDGSFFLYSKLTVTKEEWQQGFVFSCSVMHEALHNHYTQKSLSLSPGK

SEQ ID NO: 228 - protein, 217 aa, Artificial Sequence
  source: /note="Description of Artificial Sequence: Synthetic polypeptide"
APELLGGPSVFLFPPKPKDTLYITREPEVTCVVVDVSHEDPEVKFNWYVDGVEVHNAKTKPREEQYNSTYRVVSVLTVLHQDWLNGKEYKCKVSNKALPAPIEKTISKAKGQPREPQVYTLPPSRDELTKNQVSLWCLVKGFYPSDIAVLWESYGTEWASYKTTPPVLDSDGSFFLYSKLTVTKEEWQQGFVFSCSVMHEALHNHYTQKSLSLSPGK

SEQ ID NO: 229 - protein, 217 aa, Artificial Sequence
  source: /note="Description of Artificial Sequence: Synthetic polypeptide"
APEAAGGPSVFLFPPKPKDTLYITREPEVTCVVVDVSHEDPEVKFNWYVDGVEVHNAKTKPREEQYNSTYRVVSVLTVLHQDWLNGKEYKCKVSNKALPAPIEKTISKAKGQPREPQVYTLPPSRDELTKNQVSLWCLVKGFYPSDIAVLWESYGTEWASYKTTPPVLDSDGSFFLYSKLTVTKEEWQQGFVFSCSVMHEALHNHYTQKSLSLSPGK

SEQ ID NO: 230 - protein, 217 aa, Artificial Sequence
  source: /note="Description of Artificial Sequence: Synthetic polypeptide"
APEAAGGPSVFLFPPKPKDTLYITREPEVTCVVVDVSHEDPEVKFNWYVDGVEVHNAKTKPREEQYNSTYRVVSVLTVLHQDWLNGKEYKCKVSNKALGAPIEKTISKAKGQPREPQVYTLPPSRDELTKNQVSLWCLVKGFYPSDIAVLWESYGTEWASYKTTPPVLDSDGSFFLYSKLTVTKEEWQQGFVFSCSVMHEALHNHYTQKSLSLSPGK

SEQ ID NO: 231 - protein, 217 aa, Artificial Sequence
  source: /note="Description of Artificial Sequence: Synthetic polypeptide"
APELLGGPSVFLFPPKPKDTLMISRTPEVTCVVVDVSHEDPEVKFNWYVDGVEVHNAKTKPREEQYNSTYRVVSVLTVLHQDWLNGKEYKCKVSNKALPAPIEKTISKAKGQPREPQVYTLPPSRDELTKNQVSLSCAVKGFYPSDIAVLWESYGTEWASYKTTPPVLDSDGSFFLVSKLTVTKEEWQQGFVFSCSVMHEALHNHYTQKSLSLSPGK

SEQ ID NO: 232 - protein, 217 aa, Artificial Sequence
  source: /note="Description of Artificial Sequence: Synthetic polypeptide"
APEAAGGPSVFLFPPKPKDTLMISRTPEVTCVVVDVSHEDPEVKFNWYVDGVEVHNAKTKPREEQYNSTYRVVSVLTVLHQDWLNGKEYKCKVSNKALPAPIEKTISKAKGQPREPQVYTLPPSRDELTKNQVSLSCAVKGFYPSDIAVLWESYGTEWASYKTTPPVLDSDGSFFLVSKLTVTKEEWQQGFVFSCSVMHEALHNHYTQKSLSLSPGK

SEQ ID NO: 233 - protein, 217 aa, Artificial Sequence
  source: /note="Description of Artificial Sequence: Synthetic polypeptide"
APEAAGGPSVFLFPPKPKDTLMISRTPEVTCVVVDVSHEDPEVKFNWYVDGVEVHNAKTKPREEQYNSTYRVVSVLTVLHQDWLNGKEYKCKVSNKALGAPIEKTISKAKGQPREPQVYTLPPSRDELTKNQVSLSCAVKGFYPSDIAVLWESYGTEWASYKTTPPVLDSDGSFFLVSKLTVTKEEWQQGFVFSCSVMHEALHNHYTQKSLSLSPGK

SEQ ID NO: 234 - protein, 217 aa, Artificial Sequence
  source: /note="Description of Artificial Sequence: Synthetic polypeptide"
APELLGGPSVFLFPPKPKDTLYITREPEVTCVVVDVSHEDPEVKFNWYVDGVEVHNAKTKPREEQYNSTYRVVSVLTVLHQDWLNGKEYKCKVSNKALPAPIEKTISKAKGQPREPQVYTLPPSRDELTKNQVSLSCAVKGFYPSDIAVLWESYGTEWASYKTTPPVLDSDGSFFLVSKLTVTKEEWQQGFVFSCSVMHEALHNHYTQKSLSLSPGK

SEQ ID NO: 235 - protein, 217 aa, Artificial Sequence
  source: /note="Description of Artificial Sequence: Synthetic polypeptide"
APEAAGGPSVFLFPPKPKDTLYITREPEVTCVVVDVSHEDPEVKFNWYVDGVEVHNAKTKPREEQYNSTYRVVSVLTVLHQDWLNGKEYKCKVSNKALPAPIEKTISKAKGQPREPQVYTLPPSRDELTKNQVSLSCAVKGFYPSDIAVLWESYGTEWASYKTTPPVLDSDGSFFLVSKLTVTKEEWQQGFVFSCSVMHEALHNHYTQKSLSLSPGK

SEQ ID NO: 236 - protein, 217 aa, Artificial Sequence
  source: /note="Description of Artificial Sequence: Synthetic polypeptide"
APEAAGGPSVFLFPPKPKDTLYITREPEVTCVVVDVSHEDPEVKFNWYVDGVEVHNAKTKPREEQYNSTYRVVSVLTVLHQDWLNGKEYKCKVSNKALGAPIEKTISKAKGQPREPQVYTLPPSRDELTKNQVSLSCAVKGFYPSDIAVLWESYGTEWASYKTTPPVLDSDGSFFLVSKLTVTKEEWQQGFVFSCSVMHEALHNHYTQKSLSLSPGK

SEQ ID NO: 237 - protein, 217 aa, Artificial Sequence
  source: /note="Description of Artificial Sequence: Synthetic polypeptide"
APELLGGPSVFLFPPKPKDTLMISRTPEVTCVVVDVSHEDPEVKFNWYVDGVEVHNAKTKPREEQYNSTYRVVSVLTVLHQDWLNGKEYKCKVSNKALPAPIEKTISKAKGQPREPQVYTLPPSRDELTKNQVSLWCLVKGFYPSDIAVEWESYGTEWSNYKTTPPVLDSDGSFFLYSKLTVTKEEWQQGFVFSCSVMHEALHNHYTQKSLSLSPGK

SEQ ID NO: 238 - protein, 217 aa, Artificial Sequence
  source: /note="Description of Artificial Sequence: Synthetic polypeptide"
APEAAGGPSVFLFPPKPKDTLMISRTPEVTCVVVDVSHEDPEVKFNWYVDGVEVHNAKTKPREEQYNSTYRVVSVLTVLHQDWLNGKEYKCKVSNKALPAPIEKTISKAKGQPREPQVYTLPPSRDELTKNQVSLWCLVKGFYPSDIAVEWESYGTEWSNYKTTPPVLDSDGSFFLYSKLTVTKEEWQQGFVFSCSVMHEALHNHYTQKSLSLSPGK

SEQ ID NO: 239 - protein, 217 aa, Artificial Sequence
  source: /note="Description of Artificial Sequence: Synthetic polypeptide"
APEAAGGPSVFLFPPKPKDTLMISRTPEVTCVVVDVSHEDPEVKFNWYVDGVEVHNAKTKPREEQYNSTYRVVSVLTVLHQDWLNGKEYKCKVSNKALGAPIEKTISKAKGQPREPQVYTLPPSRDELTKNQVSLWCLVKGFYPSDIAVEWESYGTEWSNYKTTPPVLDSDGSFFLYSKLTVTKEEWQQGFVFSCSVMHEALHNHYTQKSLSLSPGK

SEQ ID NO: 240 - protein, 217 aa, Artificial Sequence
  source: /note="Description of Artificial Sequence: Synthetic polypeptide"
APELLGGPSVFLFPPKPKDTLYITREPEVTCVVVDVSHEDPEVKFNWYVDGVEVHNAKTKPREEQYNSTYRVVSVLTVLHQDWLNGKEYKCKVSNKALPAPIEKTISKAKGQPREPQVYTLPPSRDELTKNQVSLWCLVKGFYPSDIAVEWESYGTEWSNYKTTPPVLDSDGSFFLYSKLTVTKEEWQQGFVFSCSVMHEALHNHYTQKSLSLSPGK

SEQ ID NO: 241 - protein, 217 aa, Artificial Sequence
  source: /note="Description of Artificial Sequence: Synthetic polypeptide"
APEAAGGPSVFLFPPKPKDTLYITREPEVTCVVVDVSHEDPEVKFNWYVDGVEVHNAKTKPREEQYNSTYRVVSVLTVLHQDWLNGKEYKCKVSNKALPAPIEKTISKAKGQPREPQVYTLPPSRDELTKNQVSLWCLVKGFYPSDIAVEWESYGTEWSNYKTTPPVLDSDGSFFLYSKLTVTKEEWQQGFVFSCSVMHEALHNHYTQKSLSLSPGK

SEQ ID NO: 242 - protein, 217 aa, Artificial Sequence
  source: /note="Description of Artificial Sequence: Synthetic polypeptide"
APEAAGGPSVFLFPPKPKDTLYITREPEVTCVVVDVSHEDPEVKFNWYVDGVEVHNAKTKPREEQYNSTYRVVSVLTVLHQDWLNGKEYKCKVSNKALGAPIEKTISKAKGQPREPQVYTLPPSRDELTKNQVSLWCLVKGFYPSDIAVEWESYGTEWSNYKTTPPVLDSDGSFFLYSKLTVTKEEWQQGFVFSCSVMHEALHNHYTQKSLSLSPGK

SEQ ID NO: 243 - protein, 217 aa, Artificial Sequence
  source: /note="Description of Artificial Sequence: Synthetic polypeptide"
APELLGGPSVFLFPPKPKDTLMISRTPEVTCVVVDVSHEDPEVKFNWYVDGVEVHNAKTKPREEQYNSTYRVVSVLTVLHQDWLNGKEYKCKVSNKALPAPIEKTISKAKGQPREPQVYTLPPSRDELTKNQVSLSCAVKGFYPSDIAVEWESYGTEWSNYKTTPPVLDSDGSFFLVSKLTVTKEEWQQGFVFSCSVMHEALHNHYTQKSLSLSPGK

SEQ ID NO: 244 - protein, 217 aa, Artificial Sequence
  source: /note="Description of Artificial Sequence: Synthetic polypeptide"
APEAAGGPSVFLFPPKPKDTLMISRTPEVTCVVVDVSHEDPEVKFNWYVDGVEVHNAKTKPREEQYNSTYRVVSVLTVLHQDWLNGKEYKCKVSNKALPAPIEKTISKAKGQPREPQVYTLPPSRDELTKNQVSLSCAVKGFYPSDIAVEWESYGTEWSNYKTTPPVLDSDGSFFLVSKLTVTKEEWQQGFVFSCSVMHEALHNHYTQKSLSLSPGK

SEQ ID NO: 245 - protein, 217 aa, Artificial Sequence
  source: /note="Description of Artificial Sequence: Synthetic polypeptide"
APEAAGGPSVFLFPPKPKDTLMISRTPEVTCVVVDVSHEDPEVKFNWYVDGVEVHNAKTKPREEQYNSTYRVVSVLTVLHQDWLNGKEYKCKVSNKALGAPIEKTISKAKGQPREPQVYTLPPSRDELTKNQVSLSCAVKGFYPSDIAVEWESYGTEWSNYKTTPPVLDSDGSFFLVSKLTVTKEEWQQGFVFSCSVMHEALHNHYTQKSLSLSPGK

SEQ ID NO: 246 - protein, 217 aa, Artificial Sequence
  source: /note="Description of Artificial Sequence: Synthetic polypeptide"
APELLGGPSVFLFPPKPKDTLYITREPEVTCVVVDVSHEDPEVKFNWYVDGVEVHNAKTKPREEQYNSTYRVVSVLTVLHQDWLNGKEYKCKVSNKALPAPIEKTISKAKGQPREPQVYTLPPSRDELTKNQVSLSCAVKGFYPSDIAVEWESYGTEWSNYKTTPPVLDSDGSFFLVSKLTVTKEEWQQGFVFSCSVMHEALHNHYTQKSLSLSPGK

SEQ ID NO: 247 - protein, 217 aa, Artificial Sequence
  source: /note="Description of Artificial Sequence: Synthetic polypeptide"
APEAAGGPSVFLFPPKPKDTLYITREPEVTCVVVDVSHEDPEVKFNWYVDGVEVHNAKTKPREEQYNSTYRVVSVLTVLHQDWLNGKEYKCKVSNKALPAPIEKTISKAKGQPREPQVYTLPPSRDELTKNQVSLSCAVKGFYPSDIAVEWESYGTEWSNYKTTPPVLDSDGSFFLVSKLTVTKEEWQQGFVFSCSVMHEALHNHYTQKSLSLSPGK

SEQ ID NO: 248 - protein, 217 aa, Artificial Sequence
  source: /note="Description of Artificial Sequence: Synthetic polypeptide"
APEAAGGPSVFLFPPKPKDTLYITREPEVTCVVVDVSHEDPEVKFNWYVDGVEVHNAKTKPREEQYNSTYRVVSVLTVLHQDWLNGKEYKCKVSNKALGAPIEKTISKAKGQPREPQVYTLPPSRDELTKNQVSLSCAVKGFYPSDIAVEWESYGTEWSNYKTTPPVLDSDGSFFLVSKLTVTKEEWQQGFVFSCSVMHEALHNHYTQKSLSLSPGK

SEQ ID NO: 249 - protein, 247 aa, Artificial Sequence
  source: /note="Description of Artificial Sequence: Synthetic polypeptide"
METDTLLLWVLLLWVPGSTGDKTHTCPPCPAPEAAGGPSVFLFPPKPKDTLYITREPEVTCVVVDVSHEDPEVKFNWYVDGVEVHNAKTKPREEQYNSTYRVVSVLTVLHQDWLNGKEYKCKVSNKALGAPIEKTISKAKGQPREPQVYTLPPSRDELTKNQVSLTCLVKGFYPSDIAVEWESYGTEWSSYKTTPPVLDSDGSFFLYSKLTVTKSEWQQGFVFSCSVMHEALHNHYTQKSLSLSPGK

SEQ ID NO: 250 - protein, 217 aa, Artificial Sequence
  source: /note="Description of Artificial Sequence: Synthetic polypeptide"
APELLGGPSVFLFPPKPKDTLMISRTPEVTCVVVDVSHEDPEVKFNWYVDGVEVHNAKTKPREEQYNSTYRVVSVLTVLHQDWLNGKEYKCKVSNKALPAPIEKTISKAKGQPREPQVYTLPPSRDELTKNQVSLWCLVKGFYPSDIAVWWESYGTEWSSYKTTPPVLDSDGSFFLYSKLTVTKEEWQQGFVFSCSVMHEALHNHYTQKSLSLSPGK

SEQ ID NO: 251 - protein, 217 aa, Artificial Sequence
  source: /note="Description of Artificial Sequence: Synthetic polypeptide"
APELLGGPSVFLFPPKPKDTLMISRTPEVTCVVVDVSHEDPEVKFNWYVDGVEVHNAKTKPREEQYNSTYRVVSVLTVLHQDWLNGKEYKCKVSNKALPAPIEKTISKAKGQPREPQVYTLPPSRDELTKNQVSLSCAVKGFYPSDIAVEWESNGQPENNYKTTPPVLDSDGSFFLVSKLTVDKSRWQQGNVFSCSVMHEALHNHYTQKSLSLSPGK

SEQ ID NO: 252 - protein, 217 aa, Artificial Sequence
  source: /note="Description of Artificial Sequence: Synthetic polypeptide"
APEAAGGPSVFLFPPKPKDTLMISRTPEVTCVVVDVSHEDPEVKFNWYVDGVEVHNAKTKPREEQYNSTYRVVSVLTVLHQDWLNGKEYKCKVSNKALPAPIEKTISKAKGQPREPQVYTLPPSRDELTKNQVSLWCLVKGFYPSDIAVWWESYGTEWSSYKTTPPVLDSDGSFFLYSKLTVTKEEWQQGFVFSCSVMHEALHNHYTQKSLSLSPGK

SEQ ID NO: 253 - protein, 217 aa, Artificial Sequence
  source: /note="Description of Artificial Sequence: Synthetic polypeptide"
APEAAGGPSVFLFPPKPKDTLMISRTPEVTCVVVDVSHEDPEVKFNWYVDGVEVHNAKTKPREEQYNSTYRVVSVLTVLHQDWLNGKEYKCKVSNKALPAPIEKTISKAKGQPREPQVYTLPPSRDELTKNQVSLSCAVKGFYPSDIAVEWESNGQPENNYKTTPPVLDSDGSFFLVSKLTVDKSRWQQGNVFSCSVMHEALHNHYTQKSLSLSPGK

SEQ ID NO: 254 - protein, 451 aa, Artificial Sequence
  source: /note="Description of Artificial Sequence: Synthetic polypeptide"
QVQLQQPGAELVKPGASVKMSCKASGYTFTSYNMHWVKQTPGRGLEWIGAIYPGNGDTSYNQKFKGKATLTADKSSSTAYMQLSSLTSEDSAVYYCARSTYYGGDWYFNVWGAGTTVTVSAASTKGPSVFPLAPSSKSTSGGTAALGCLVKDYFPEPVTVSWNSGALTSGVHTFPAVLQSSGLYSLSSVVTVPSSSLGTQTYICNVNHKPSNTKVDKKVEPKSCDKTHTCPPCPAPELLGGPSVFLFPPKPKDTLMISRTPEVTCVVVDVSHEDPEVKFNWYVDGVEVHNAKTKPREEQYNSTYRVVSVLTVLHQDWLNGKEYKCKVSNKALPAPIEKTISKAKGQPREPQVYTLPPSRDELTKNQVSLWCLVKGFYPSDIAVWWESYGTEWSSYKTTPPVLDSDGSFFLYSKLTVTKEEWQQGFVFSCSVMHEALHNHYTQKSLSLSPGK

SEQ ID NO: 255 - protein, 451 aa, Artificial Sequence
  source: /note="Description of Artificial Sequence: Synthetic polypeptide"
QVQLQQPGAELVKPGASVKMSCKASGYTFTSYNMHWVKQTPGRGLEWIGAIYPGNGDTSYNQKFKGKATLTADKSSSTAYMQLSSLTSEDSAVYYCARSTYYGGDWYFNVWGAGTTVTVSAASTKGPSVFPLAPSSKSTSGGTAALGCLVKDYFPEPVTVSWNSGALTSGVHTFPAVLQSSGLYSLSSVVTVPSSSLGTQTYICNVNHKPSNTKVDKKVEPKSCDKTHTCPPCPAPEAAGGPSVFLFPPKPKDTLMISRTPEVTCVVVDVSHEDPEVKFNWYVDGVEVHNAKTKPREEQYNSTYRVVSVLTVLHQDWLNGKEYKCKVSNKALPAPIEKTISKAKGQPREPQVYTLPPSRDELTKNQVSLWCLVKGFYPSDIAVWWESYGTEWSSYKTTPPVLDSDGSFFLYSKLTVTKEEWQQGFVFSCSVMHEALHNHYTQKSLSLSPGK

SEQ ID NO: 256 - protein, 451 aa, Artificial Sequence
  source: /note="Description of Artificial Sequence: Synthetic polypeptide"
QVQLQQPGAELVKPGASVKMSCKASGYTFTSYNMHWVKQTPGRGLEWIGAIYPGNGDTSYNQKFKGKATLTADKSSSTAYMQLSSLTSEDSAVYYCARSTYYGGDWYFNVWGAGTTVTVSAASTKGPSVFPLAPSSKSTSGGTAALGCLVKDYFPEPVTVSWNSGALTSGVHTFPAVLQSSGLYSLSSVVTVPSSSLGTQTYICNVNHKPSNTKVDKKVEPKSCDKTHTCPPCPAPELLGGPSVFLFPPKPKDTLMISRTPEVTCVVVDVSHEDPEVKFNWYVDGVEVHNAKTKPREEQYNSTYRVVSVLTVLHQDWLNGKEYKCKVSNKALPAPIEKTISKAKGQPREPQVYTLPPSRDELTKNQVSLSCAVKGFYPSDIAVEWESNGQPENNYKTTPPVLDSDGSFFLVSKLTVDKSRWQQGNVFSCSVMHEALHNHYTQKSLSLSPGK

SEQ ID NO: 257 - protein, 451 aa, Artificial Sequence
  source: /note="Description of Artificial Sequence: Synthetic polypeptide"
QVQLQQPGAELVKPGASVKMSCKASGYTFTSYNMHWVKQTPGRGLEWIGAIYPGNGDTSYNQKFKGKATLTADKSSSTAYMQLSSLTSEDSAVYYCARSTYYGGDWYFNVWGAGTTVTVSAASTKGPSVFPLAPSSKSTSGGTAALGCLVKDYFPEPVTVSWNSGALTSGVHTFPAVLQSSGLYSLSSVVTVPSSSLGTQTYICNVNHKPSNTKVDKKVEPKSCDKTHTCPPCPAPEAAGGPSVFLFPPKPKDTLMISRTPEVTCVVVDVSHEDPEVKFNWYVDGVEVHNAKTKPREEQYNSTYRVVSVLTVLHQDWLNGKEYKCKVSNKALPAPIEKTISKAKGQPREPQVYTLPPSRDELTKNQVSLSCAVKGFYPSDIAVEWESNGQPENNYKTTPPVLDSDGSFFLVSKLTVDKSRWQQGNVFSCSVMHEALHNHYTQKSLSLSPGK

SEQ ID NO: 258 - protein, 213 aa, Artificial Sequence
  source: /note="Description of Artificial Sequence: Synthetic polypeptide"
QIVLSQSPAILSASPGEKVTMTCRASSSVSYIHWFQQKPGSSPKPWIYATSNLASGVPVRFSGSGSGTSYSLTISRVEAEDAATYYCQQWTSNPPTFGGGTKLEIKRTVAAPSVFIFPPSDEQLKSGTASVVCLLNNFYPREAKVQWKVDNALQSGNSQESVTEQDSKDSTYSLSSTLTLSKADYEKHKVYACEVTHQGLSSPVTKSFNRGEC

SEQ ID NO: 259 - protein, 451 aa, Artificial Sequence
  source: /note="Description of Artificial Sequence: Synthetic polypeptide"
QVQLQQPGAELVRPGTSVKLSCKASGYTFTSYWMHWIKQRPGQGLEWIGVIDPSDNYTKYNQKFKGKATLTVDTSSSTAYMQLSSLTSEDSAVYFCAREGYYGSSPWFAYWGQGTLVTVSSASTKGPSVFPLAPSSKSTSGGTAALGCLVKDYFPEPVTVSWNSGALTSGVHTFPAVLQSSGLYSLSSVVTVPSSSLGTQTYICNVNHKPSNTKVDKKVEPKSCDKTHTCPPCPAPELLGGPSVFLFPPKPKDTLMISRTPEVTCVVVDVSHEDPEVKFNWYVDGVEVHNAKTKPREEQYNSTYRVVSVLTVLHQDWLNGKEYKCKVSNKALPAPIEKTISKAKGQPREPQVYTLPPSRDELTKNQVSLWCLVKGFYPSDIAVWWESYGTEWSSYKTTPPVLDSDGSFFLYSKLTVTKEEWQQGFVFSCSVMHEALHNHYTQKSLSLSPGK

SEQ ID NO: 260 - protein, 451 aa, Artificial Sequence
  source: /note="Description of Artificial Sequence: Synthetic polypeptide"
QVQLQQPGAELVRPGTSVKLSCKASGYTFTSYWMHWIKQRPGQGLEWIGVIDPSDNYTKYNQKFKGKATLTVDTSSSTAYMQLSSLTSEDSAVYFCAREGYYGSSPWFAYWGQGTLVTVSSASTKGPSVFPLAPSSKSTSGGTAALGCLVKDYFPEPVTVSWNSGALTSGVHTFPAVLQSSGLYSLSSVVTVPSSSLGTQTYICNVNHKPSNTKVDKKVEPKSCDKTHTCPPCPAPEAAGGPSVFLFPPKPKDTLMISRTPEVTCVVVDVSHEDPEVKFNWYVDGVEVHNAKTKPREEQYNSTYRVVSVLTVLHQDWLNGKEYKCKVSNKALPAPIEKTISKAKGQPREPQVYTLPPSRDELTKNQVSLWCLVKGFYPSDIAVWWESYGTEWSSYKTTPPVLDSDGSFFLYSKLTVTKEEWQQGFVFSCSVMHEALHNHYTQKSLSLSPGK

SEQ ID NO: 261 - protein, 451 aa, Artificial Sequence
  source: /note="Description of Artificial Sequence: Synthetic polypeptide"
QVQLQQPGAELVRPGTSVKLSCKASGYTFTSYWMHWIKQRPGQGLEWIGVIDPSDNYTKYNQKFKGKATLTVDTSSSTAYMQLSSLTSEDSAVYFCAREGYYGSSPWFAYWGQGTLVTVSSASTKGPSVFPLAPSSKSTSGGTAALGCLVKDYFPEPVTVSWNSGALTSGVHTFPAVLQSSGLYSLSSVVTVPSSSLGTQTYICNVNHKPSNTKVDKKVEPKSCDKTHTCPPCPAPELLGGPSVFLFPPKPKDTLMISRTPEVTCVVVDVSHEDPEVKFNWYVDGVEVHNAKTKPREEQYNSTYRVVSVLTVLHQDWLNGKEYKCKVSNKALPAPIEKTISKAKGQPREPQVYTLPPSRDELTKNQVSLSCAVKGFYPSDIAVEWESNGQPENNYKTTPPVLDSDGSFFLVSKLTVDKSRWQQGNVFSCSVMHEALHNHYTQKSLSLSPGK

SEQ ID NO: 262 - protein, 451 aa, Artificial Sequence
  source: /note="Description of Artificial Sequence: Synthetic polypeptide"
QVQLQQPGAELVRPGTSVKLSCKASGYTFTSYWMHWIKQRPGQGLEWIGVIDPSDNYTKYNQKFKGKATLTVDTSSSTAYMQLSSLTSEDSAVYFCAREGYYGSSPWFAYWGQGTLVTVSSASTKGPSVFPLAPSSKSTSGGTAALGCLVKDYFPEPVTVSWNSGALTSGVHTFPAVLQSSGLYSLSSVVTVPSSSLGTQTYICNVNHKPSNTKVDKKVEPKSCDKTHTCPPCPAPEAAGGPSVFLFPPKPKDTLMISRTPEVTCVVVDVSHEDPEVKFNWYVDGVEVHNAKTKPREEQYNSTYRVVSVLTVLHQDWLNGKEYKCKVSNKALPAPIEKTISKAKGQPREPQVYTLPPSRDELTKNQVSLSCAVKGFYPSDIAVEWESNGQPENNYKTTPPVLDSDGSFFLVSKLTVDKSRWQQGNVFSCSVMHEALHNHYTQKSLSLSPGK

SEQ ID NO: 263 - protein, 213 aa, Artificial Sequence
  source: /note="Description of Artificial Sequence: Synthetic polypeptide"
QIVMSQSPAILSASPGEKVTMTCRARSSVSYIHWYQQKPGSSPKPWIYATSNLASGVPGRFSGSGSGTSYSLTITRVEAEDAATYYCQQWSSKPPTFGGGTKLEIKRTVAAPSVFIFPPSDEQLKSGTASVVCLLNNFYPREAKVQWKVDNALQSGNSQESVTEQDSKDSTYSLSSTLTLSKADYEKHKVYACEVTHQGLSSPVTKSFNRGEC

SEQ ID NO: 264 - DNA, 23 bp, Artificial Sequence
  source: /note="Description of Artificial Sequence: Synthetic oligonucleotide"
gaatacatacactcctcgtgagg

SEQ ID NO: 265 - DNA, 23 bp, Artificial Sequence
  source: /note="Description of Artificial Sequence: Synthetic oligonucleotide"
agaagaatacttaacatctttgg

SEQ ID NO: 266 - DNA, 552 bp, Artificial Sequence
  source: /note="Description of Artificial Sequence: Synthetic polynucleotide"
gctcagaactccgtgatcatcgtggataagaacggccggctggtgtacctggtggagaaccctggcggatacgtggcttactctaaggccgctaccgtgacaggcaagctggtgcacgccaacttcggaaccaagaaggactttgaggatctgtacacaccagtgaacggctctatcgtgatcgtgcgcgctggaaagatcaccttcgccgagaaggtggctaacgccgagagcctgaacgccatcggcgtgctgatctacatggatcagacaaagtttcccatcgtgaacgctgagctgtctttctttggacacgctcacctgggcaccggagacccatacacacccggattccctagctttaaccacacccagttccccccttccaggtctagcggactgccaaacatccccgtgcagacaatcagcagagccgctgccgagaagctgtttggcaacatggagggagactgcccctccgattggaagaccgactctacatgtaggatggtgacctccgagtcaaaaaatgtcaaactcaccgtgtccaat

SEQ ID NO: 267 - DNA, 2329 bp, Artificial Sequence
  source: /note="Description of Artificial Sequence: Synthetic polynucleotide"
ctatacagatatataaggatggggctttttttttttaatttttaaaaaagatttgtttattattatatgtaagtacactgtagctgtcttcagacactccagaagagggcatcagatctcattacagatggttgtgagctaccatgtggtcactgggatttgaactcaggaccttcagaagagcagtcagtgctcttaactgataagttaataataagttaactgataaggtaataaaggtcccctatgaaaagggttcagacccaaagagtcagagatccacaggttgagaacctcctgccctaaatcttgttgctctccttattcaagaccactcctgttgcagttgctcttaagcatgagtatgctcccttctgaaagtctccatagcagccatctctccagccccagagtgaggcttttaaaggaatcttcatgataaatagaatttttaaaaaagtaactgaagttacttaaggtgttaaggtacattttattccctcagtaactggttaatctagcagttttgagtcatacttcatttatcttgactttgaagagtaagatattaaaacaatttgcttgatccttgaagtaagtatttaaatagacattttaatgcagactttttttagttgactggtggtgttgcacgtggtcaatccaagtactcatgggaggcagaggcaggaggatctctctctagaccagcctggtctatagagcaagttccaggacagccagggctacacagaaaccttgtttcaaacaagacttttatccttccaggcagctgagccagaatacatacactcctagggaagctggttcacagaaggacgaatccctggcatactacatcgagaatcagtttcacgagttcaagtttagcaaagtctggagagatgagcactacgtgaagatccaggtgaagagctccgctcagaactccgtgatcatcgtggataagaacggccggctggtgtacctggtggagaaccctggcggatacgtggcttactctaaggccgctaccgtgacaggcaagctggtgcacgccaacttcggaaccaagaaggactttgaggatctgtacacaccagtgaacggctctatcgtgatcgtgcgcgctggaaagatcaccttcgccgagaaggtggctaacgccgagagcctgaacgccatcggcgtgctgatctacatggatcagacaaagtttcccatcgtgaacgctgagctgtctttctttggacacgctcacctgggcaccggagacccatacacacccggattccctagctttaaccacacccagttccccccttccaggtctagcggactgccaaacatccccgtgcagacaatcagcagagccgctgccgagaagctgtttggcaacatggagggagactgcccctccgattggaagaccgactctacatgtaggatggtgacctccgagtcaaaaaatgtcaaactcaccgtgtccaatgtgctgaaagaacgacgcatcctgaatatctttggagttattaaaggttatgaggaaccaggtaaagacctgctttgtactttttcactttactgttttgcttactgtagataggtctagtgcaggaaggagaaggatgctagcttggcatgaactgctatatcttgtttgtcctaatgtgaactttgtaatatatgtgtatataacacataatatggccatgtaagtgtatggagaggccagagttaagtattaaatatctttctgtaatcatttaaaattttacatatgaaggtcagtgaacagattgaaggagttttgtccaggtgggacttggatctaaattttttacaatgcctggcagcaaacacctttttaatcaactgagctgtctccccaaataaagtgaatgtgatatcagcttgtggataatttttttttgttgctttgataagtggttttcttacaggatcacataccagttctgtccatagcattaaacaaacataactgtcatgcagtagattaatgtgcagggcacatccaacagtcacatttattaataggacaaaaagttggaccttatatgtagcacacctataattccagtgctaggaagatccgggtaggagatccttagttcggtgctacttagtgagggtttgtttcaaaaaacaaaagctatgatggtgtgttgccttttttcttttagaccgttatgttgtagtaggagcccagagagacgctttgggtgctggtgttgcggcgaagtccagtgtgggaacaggtcttctgttgaaacttgcccaagtattctcagatatgatttcaaaaggt

SEQ ID NO: 268 - protein, 217 aa, Artificial Sequence
  source: /note="Description of Artificial Sequence: Synthetic polypeptide"
APELLGGPSVFLFPPKPKDTLMISRTPEVTCVVVDVSHEDPEVKFNWYVDGVEVHNAKTKPREEQYNSTYRVVSVLTVLHQDWLNGKEYKCKVSNKALPAPIEKTISKAKGQPREPQVYTLPPSRDELTKNQVSLTCLVKGFYPSDIAVEWESFGTEWSSYKTTPPVLDSDGSFFLYSKLTVSKEEWQQGFVFSCSVMHEALHNHYTQKSLSLSPGK

SEQ ID NO: 269 - protein, 217 aa, Artificial Sequence
  source: /note="Description of Artificial Sequence: Synthetic polypeptide"
APELLGGPSVFLFPPKPKDTLMISRTPEVTCVVVDVSHEDPEVKFNWYVDGVEVHNAKTKPREEQYNSTYRVVSVLTVLHQDWLNGKEYKCKVSNKALPAPIEKTISKAKGQPREPQVYTLPPSRDELTKNQVSLTCLVKGFYPSDIAVEWESYGTEWANYKTTPPVLDSDGSFFLYSKLTVSKSEWQQGFVFSCSVMHEALHNHYTQKSLSLSPGK

SEQ ID NO: 270 - protein, 217 aa, Artificial Sequence
  source: /note="Description of Artificial Sequence: Synthetic polypeptide"
APELLGGPSVFLFPPKPKDTLMISRTPEVTCVVVDVSHEDPEVKFNWYVDGVEVHNAKTKPREEQYNSTYRVVSVLTVLHQDWLNGKEYKCKVSNKALPAPIEKTISKAKGQPREPQVYTLPPSRDELTKNQVSLTCLVKGFYPSDIAVEWESFGTEWSNYKTTPPVLDSDGSFFLYSKLTVSKEEWQQGFVFSCSVMHEALHNHYTQKSLSLSPGK

SEQ ID NO: 271 - protein, 217 aa, Artificial Sequence
  source: /note="Description of Artificial Sequence: Synthetic polypeptide"
APELLGGPSVFLFPPKPKDTLMISRTPEVTCVVVDVSHEDPEVKFNWYVDGVEVHNAKTKPREEQYNSTYRVVSVLTVLHQDWLNGKEYKCKVSNKALPAPIEKTISKAKGQPREPQVYTLPPSRDELTKNQVSLTCLVKGFYPSDIAVEWESYGTEWSSYKTTPPVLDSDGSFFLYSKLTVSKSEWQQGFVFSCSVMHEALHNHYTQKSLSLSPGK

SEQ ID NO: 272 - protein, 217 aa, Artificial Sequence
  source: /note="Description of Artificial Sequence: Synthetic polypeptide"
APELLGGPSVFLFPPKPKDTLMISRTPEVTCVVVDVSHEDPEVKFNWYVDGVEVHNAKTKPREEQYNSTYRVVSVLTVLHQDWLNGKEYKCKVSNKALPAPIEKTISKAKGQPREPQVYTLPPSRDELTKNQVSLTCLVKGFYPSDIAVEWESYGTEWVNYKTTPPVLDSDGSFFLYSKLTVSKEEWQQGFVFSCSVMHEALHNHYTQKSLSLSPGK

SEQ ID NO: 273 - protein, 217 aa, Artificial Sequence; identical to SEQ ID NO: 14
  source: /note="Description of Artificial Sequence: Synthetic polypeptide"

SEQ ID NO: 274 - protein, 217 aa, Artificial Sequence
  source: /note="Description of Artificial Sequence: Synthetic polypeptide"
APELLGGPSVFLFPPKPKDTLMISRTPEVTCVVVDVSHEDPEVKFNWYVDGVEVHNAKTKPREEQYNSTYRVVSVLTVLHQDWLNGKEYKCKVSNKALPAPIEKTISKAKGQPREPQVYTLPPSRDELTKNQVSLTCLVKGFYPSDIAVEWESFGTEWVNYKTTPPVLDSDGSFFLYSKLTVSKEEWQQGFVFSCSVMHEALHNHYTQKSLSLSPGK

SEQ ID NO: 275 - protein, 217 aa, Artificial Sequence
  source: /note="Description of Artificial Sequence: Synthetic polypeptide"
APEAAGGPSVFLFPPKPKDTLMISRTPEVTCVVVDVSHEDPEVKFNWYVDGVEVHNAKTKPREEQYNSTYRVVSVLTVLHQDWLNGKEYKCKVSNKALGAPIEKTISKAKGQPREPQVYTLPPSRDELTKNQVSLWCLVKGFYPSDIAVWWESYGTEWSSYKTTPPVLDSDGSFFLYSKLTVTKEEWQQGFVFSCSVMHEALHNHYTQKSLSLSPGK

SEQ ID NO: 276 - protein, 217 aa, Artificial Sequence
  source: /note="Description of Artificial Sequence: Synthetic polypeptide"
APELLGGPSVFLFPPKPKDTLYITREPEVTCVVVDVSHEDPEVKFNWYVDGVEVHNAKTKPREEQYNSTYRVVSVLTVLHQDWLNGKEYKCKVSNKALPAPIEKTISKAKGQPREPQVYTLPPSRDELTKNQVSLWCLVKGFYPSDIAVWWESYGTEWSSYKTTPPVLDSDGSFFLYSKLTVTKEEWQQGFVFSCSVMHEALHNHYTQKSLSLSPGK

SEQ ID NO: 277 - protein, 217 aa, Artificial Sequence
  source: /note="Description of Artificial Sequence: Synthetic polypeptide"
APEAAGGPSVFLFPPKPKDTLYITREPEVTCVVVDVSHEDPEVKFNWYVDGVEVHNAKTKPREEQYNSTYRVVSVLTVLHQDWLNGKEYKCKVSNKALPAPIEKTISKAKGQPREPQVYTLPPSRDELTKNQVSLWCLVKGFYPSDIAVWWESYGTEWSSYKTTPPVLDSDGSFFLYSKLTVTKEEWQQGFVFSCSVMHEALHNHYTQKSLSLSPGK

SEQ ID NO: 278 - protein, 217 aa, Artificial Sequence
  source: /note="Description of Artificial Sequence: Synthetic polypeptide"
APEAAGGPSVFLFPPKPKDTLYITREPEVTCVVVDVSHEDPEVKFNWYVDGVEVHNAKTKPREEQYNSTYRVVSVLTVLHQDWLNGKEYKCKVSNKALGAPIEKTISKAKGQPREPQVYTLPPSRDELTKNQVSLWCLVKGFYPSDIAVWWESYGTEWSSYKTTPPVLDSDGSFFLYSKLTVTKEEWQQGFVFSCSVMHEALHNHYTQKSLSLSPGK

SEQ ID NO: 279 - protein, 217 aa, Artificial Sequence
  source: /note="Description of Artificial Sequence: Synthetic polypeptide"
APELLGGPSVFLFPPKPKDTLMISRTPEVTCVVVDVSHEDPEVKFNWYVDGVEVHNAKTKPREEQYNSTYRVVSVLTVLHQDWLNGKEYKCKVSNKALPAPIEKTISKAKGQPREPQVYTLPPSRDELTKNQVSLSCAVKGFYPSDIAVWWESYGTEWSSYKTTPPVLDSDGSFFLVSKLTVTKEEWQQGFVFSCSVMHEALHNHYTQKSLSLSPGK

SEQ ID NO: 280 - protein, 217 aa, Artificial Sequence
  source: /note="Description of Artificial Sequence: Synthetic polypeptide"
APEAAGGPSVFLFPPKPKDTLMISRTPEVTCVVVDVSHEDPEVKFNWYVDGVEVHNAKTKPREEQYNSTYRVVSVLTVLHQDWLNGKEYKCKVSNKALPAPIEKTISKAKGQPREPQVYTLPPSRDELTKNQVSLSCAVKGFYPSDIAVWWESYGTEWSSYKTTPPVLDSDGSFFLVSKLTVTKEEWQQGFVFSCSVMHEALHNHYTQKSLSLSPGK

SEQ ID NO: 281 - protein, 217 aa, Artificial Sequence
  source: /note="Description of Artificial Sequence: Synthetic polypeptide"
APEAAGGPSVFLFPPKPKDTLMISRTPEVTCVVVDVSHEDPEVKFNWYVDGVEVHNAKTKPREEQYNSTYRVVSVLTVLHQDWLNGKEYKCKVSNKALGAPIEKTISKAKGQPREPQVYTLPPSRDELTKNQVSLSCAVKGFYPSDIAVWWESYGTEWSSYKTTPPVLDSDGSFFLVSKLTVTKEEWQQGFVFSCSVMHEALHNHYTQKSLSLSPGK

SEQ ID NO: 282 - protein, 217 aa, Artificial Sequence
  source: /note="Description of Artificial Sequence: Synthetic polypeptide"
APELLGGPSVFLFPPKPKDTLYITREPEVTCVVVDVSHEDPEVKFNWYVDGVEVHNAKTKPREEQYNSTYRVVSVLTVLHQDWLNGKEYKCKVSNKALPAPIEKTISKAKGQPREPQVYTLPPSRDELTKNQVSLSCAVKGFYPSDIAVWWESYGTEWSSYKTTPPVLDSDGSFFLVSKLTVTKEEWQQGFVFSCSVMHEALHNHYTQKSLSLSPGK

SEQ ID NO: 283 - protein, 217 aa, Artificial Sequence
  source: /note="Description of Artificial Sequence: Synthetic polypeptide"
APEAAGGPSVFLFPPKPKDTLYITREPEVTCVVVDVSHEDPEVKFNWYVDGVEVHNAKTKPREEQYNSTYRVVSVLTVLHQDWLNGKEYKCKVSNKALPAPIEKTISKAKGQPREPQVYTLPPSRDELTKNQVSLSCAVKGFYPSDIAVWWESYGTEWSSYKTTPPVLDSDGSFFLVSKLTVTKEEWQQGFVFSCSVMHEALHNHYTQKSLSLSPGK

SEQ ID NO: 284 - protein, 217 aa, Artificial Sequence
  source: /note="Description of Artificial Sequence: Synthetic polypeptide"
APEAAGGPSVFLFPPKPKDTLYITREPEVTCVVVDVSHEDPEVKFNWYVDGVEVHNAKTKPREEQYNSTYRVVSVLTVLHQDWLNGKEYKCKVSNKALGAPIEKTISKAKGQPREPQVYTLPPSRDELTKNQVSLSCAVKGFYPSDIAVWWESYGTEWSSYKTTPPVLDSDGSFFLVSKLTVTKEEWQQGFVFSCSVMHEALHNHYTQKSLSLSPGK

SEQ ID NO: 285 - protein, 217 aa, Artificial Sequence
  source: /note="Description of Artificial Sequence: Synthetic polypeptide"
APELLGGPSVFLFPPKPKDTLMISRTPEVTCVVVDVSHEDPEVKFNWYVDGVEVHNAKTKPREEQYNSTYRVVSVLTVLHQDWLNGKEYKCKVSNKALPAPIEKTISKAKGQPREPQVYTLPPSRDELTKNQVSLWCLVKGFYPSDIAVEWESFGTEWSSYKTTPPVLDSDGSFFLYSKLTVSKEEWQQGFVFSCSVMHEALHNHYTQKSLSLSPGK

SEQ ID NO: 286 - protein, 217 aa, Artificial Sequence
  source: /note="Description of Artificial Sequence: Synthetic polypeptide"
APEAAGGPSVFLFPPKPKDTLMISRTPEVTCVVVDVSHEDPEVKFNWYVDGVEVHNAKTKPREEQYNSTYRVVSVLTVLHQDWLNGKEYKCKVSNKALPAPIEKTISKAKGQPREPQVYTLPPSRDELTKNQVSLWCLVKGFYPSDIAVEWESFGTEWSSYKTTPPVLDSDGSFFLYSKLTVSKEEWQQGFVFSCSVMHEALHNHYTQKSLSLSPGK

SEQ ID NO: 287 - protein, 217 aa, Artificial Sequence
  source: /note="Description of Artificial Sequence: Synthetic polypeptide"
APEAAGGPSVFLFPPKPKDTLMISRTPEVTCVVVDVSHEDPEVKFNWYVDGVEVHNAKTKPREEQYNSTYRVVSVLTVLHQDWLNGKEYKCKVSNKALGAPIEKTISKAKGQPREPQVYTLPPSRDELTKNQVSLWCLVKGFYPSDIAVEWESFGTEWSSYKTTPPVLDSDGSFFLYSKLTVSKEEWQQGFVFSCSVMHEALHNHYTQKSLSLSPGK

SEQ ID NO: 288 - protein, 217 aa, Artificial Sequence
  source: /note="Description of Artificial Sequence: Synthetic polypeptide"
APELLGGPSVFLFPPKPKDTLYITREPEVTCVVVDVSHEDPEVKFNWYVDGVEVHNAKTKPREEQYNSTYRVVSVLTVLHQDWLNGKEYKCKVSNKALPAPIEKTISKAKGQPREPQVYTLPPSRDELTKNQVSLWCLVKGFYPSDIAVEWESFGTEWSSYKTTPPVLDSDGSFFLYSKLTVSKEEWQQGFVFSCSVMHEALHNHYTQKSLSLSPGK

SEQ ID NO: 289 - protein, 217 aa, Artificial Sequence
  source: /note="Description of Artificial Sequence: Synthetic polypeptide"
APEAAGGPSVFLFPPKPKDTLYITREPEVTCVVVDVSHEDPEVKFNWYVDGVEVHNAKTKPREEQYNSTYRVVSVLTVLHQDWLNGKEYKCKVSNKALPAPIEKTISKAKGQPREPQVYTLPPSRDELTKNQVSLWCLVKGFYPSDIAVEWESFGTEWSSYKTTPPVLDSDGSFFLYSKLTVSKEEWQQGFVFSCSVMHEALHNHYTQKSLSLSPGK

SEQ ID NO: 290 - protein, 217 aa, Artificial Sequence
  source: /note="Description of Artificial Sequence: Synthetic polypeptide"
APEAAGGPSVFLFPPKPKDTLYITREPEVTCVVVDVSHEDPEVKFNWYVDGVEVHNAKTKPREEQYNSTYRVVSVLTVLHQDWLNGKEYKCKVSNKALGAPIEKTISKAKGQPREPQVYTLPPSRDELTKNQVSLWCLVKGFYPSDIAVEWESFGTEWSSYKTTPPVLDSDGSFFLYSKLTVSKEEWQQGFVFSCSVMHEALHNHYTQKSLSLSPGK

SEQ ID NO: 291 - protein, 217 aa, Artificial Sequence
  source: /note="Description of Artificial Sequence: Synthetic polypeptide"
APELLGGPSVFLFPPKPKDTLMISRTPEVTCVVVDVSHEDPEVKFNWYVDGVEVHNAKTKPREEQYNSTYRVVSVLTVLHQDWLNGKEYKCKVSNKALPAPIEKTISKAKGQPREPQVYTLPPSRDELTKNQVSLSCAVKGFYPSDIAVEWESFGTEWSSYKTTPPVLDSDGSFFLVSKLTVSKEEWQQGFVFSCSVMHEALHNHYTQKSLSLSPGK

SEQ ID NO: 292 - protein, 217 aa, Artificial Sequence
  source: /note="Description of Artificial Sequence: Synthetic polypeptide"
APEAAGGPSVFLFPPKPKDTLMISRTPEVTCVVVDVSHEDPEVKFNWYVDGVEVHNAKTKPREEQYNSTYRVVSVLTVLHQDWLNGKEYKCKVSNKALPAPIEKTISKAKGQPREPQVYTLPPSRDELTKNQVSLSCAVKGFYPSDIAVEWESFGTEWSSYKTTPPVLDSDGSFFLVSKLTVSKEEWQQGFVFSCSVMHEALHNHYTQKSLSLSPGK

SEQ ID NO: 293 - protein, 217 aa, Artificial Sequence
  source: /note="Description of Artificial Sequence: Synthetic polypeptide"
APEAAGGPSVFLFPPKPKDTLMISRTPEVTCVVVDVSHEDPEVKFNWYVDGVEVHNAKTKPREEQYNSTYRVVSVLTVLHQDWLNGKEYKCKVSNKALGAPIEKTISKAKGQPREPQVYTLPPSRDELTKNQVSLSCAVKGFYPSDIAVEWESFGTEWSSYKTTPPVLDSDGSFFLVSKLTVSKEEWQQGFVFSCSVMHEALHNHYTQKSLSLSPGK

SEQ ID NO: 294 - protein, 217 aa, Artificial Sequence
  source: /note="Description of Artificial Sequence: Synthetic polypeptide"
APELLGGPSVFLFPPKPKDTLYITREPEVTCVVVDVSHEDPEVKFNWYVDGVEVHNAKTKPREEQYNSTYRVVSVLTVLHQDWLNGKEYKCKVSNKALPAPIEKTISKAKGQPREPQVYTLPPSRDELTKNQVSLSCAVKGFYPSDIAVEWESFGTEWSSYKTTPPVLDSDGSFFLVSKLTVSKEEWQQGFVFSCSVMHEALHNHYTQKSLSLSPGK

SEQ ID NO: 295 - protein, 217 aa, Artificial Sequence
  source: /note="Description of Artificial Sequence: Synthetic polypeptide"
APEAAGGPSVFLFPPKPKDTLYITREPEVTCVVVDVSHEDPEVKFNWYVDGVEVHNAKTKPREEQYNSTYRVVSVLTVLHQDWLNGKEYKCKVSNKALPAPIEKTISKAKGQPREPQVYTLPPSRDELTKNQVSLSCAVKGFYPSDIAVEWESFGTEWSSYKTTPPVLDSDGSFFLVSKLTVSKEEWQQGFVFSCSVMHEALHNHYTQKSLSLSPGK

SEQ ID NO: 296 - protein, 217 aa, Artificial Sequence
  source: /note="Description of Artificial Sequence: Synthetic polypeptide"
APEAAGGPSVFLFPPKPKDTLYITREPEVTCVVVDVSHEDPEVKFNWYVDGVEVHNAKTKPREEQYNSTYRVVSVLTVLHQDWLNGKEYKCKVSNKALGAPIEKTISKAKGQPREPQVYTLPPSRDELTKNQVSLSCAVKGFYPSDIAVEWESFGTEWSSYKTTPPVLDSDGSFFLVSKLTVSKEEWQQGFVFSCSVMHEALHNHYTQKSLSLSPGK

SEQ ID NO: 297 - protein, 217 aa, Artificial Sequence
  source: /note="Description of Artificial Sequence: Synthetic polypeptide"
APELLGGPSVFLFPPKPKDTLMISRTPEVTCVVVDVSHEDPEVKFNWYVDGVEVHNAKTKPREEQYNSTYRVVSVLTVLHQDWLNGKEYKCKVSNKALPAPIEKTISKAKGQPREPQVYTLPPSRDELTKNQVSLWCLVKGFYPSDIAVEWESYGTEWANYKTTPPVLDSDGSFFLYSKLTVSKSEWQQGFVFSCSVMHEALHNHYTQKSLSLSPGK

SEQ ID NO: 298 - protein, 217 aa, Artificial Sequence
  source: /note="Description of Artificial Sequence: Synthetic polypeptide"
APEAAGGPSVFLFPPKPKDTLMISRTPEVTCVVVDVSHEDPEVKFNWYVDGVEVHNAKTKPREEQYNSTYRVVSVLTVLHQDWLNGKEYKCKVSNKALPAPIEKTISKAKGQPREPQVYTLPPSRDELTKNQVSLWCLVKGFYPSDIAVEWESYGTEWANYKTTPPVLDSDGSFFLYSKLTVSKSEWQQGFVFSCSVMHEALHNHYTQKSLSLSPGK

SEQ ID NO: 299 - protein, 217 aa, Artificial Sequence
  source: /note="Description of Artificial Sequence: Synthetic polypeptide"
APEAAGGPSVFLFPPKPKDTLMISRTPEVTCVVVDVSHEDPEVKFNWYVDGVEVHNAKTKPREEQYNSTYRVVSVLTVLHQDWLNGKEYKCKVSNKALGAPIEKTISKAKGQPREPQVYTLPPSRDELTKNQVSLWCLVKGFYPSDIAVEWESYGTEWANYKTTPPVLDSDGSFFLYSKLTVSKSEWQQGFVFSCSVMHEALHNHYTQKSLSLSPGK

SEQ ID NO: 300 - protein, 217 aa, Artificial Sequence
  source: /note="Description of Artificial Sequence: Synthetic polypeptide"
APELLGGPSVFLFPPKPKDTLYITREPEVTCVVVDVSHEDPEVKFNWYVDGVEVHNAKTKPREEQYNSTYRVVSVLTVLHQDWLNGKEYKCKVSNKALPAPIEKTISKAKGQPREPQVYTLPPSRDELTKNQVSLWCLVKGFYPSDIAVEWESYGTEWANYKTTPPVLDSDGSFFLYSKLTVSKSEWQQGFVFSCSVMHEALHNHYTQKSLSLSPGK

SEQ ID NO: 301 - protein, 217 aa, Artificial Sequence
  source: /note="Description of Artificial Sequence: Synthetic polypeptide"
APEAAGGPSVFLFPPKPKDTLYITREPEVTCVVVDVSHEDPEVKFNWYVDGVEVHNAKTKPREEQYNSTYRVVSVLTVLHQDWLNGKEYKCKVSNKALPAPIEKTISKAKGQPREPQVYTLPPSRDELTKNQVSLWCLVKGFYPSDIAVEWESYGTEWANYKTTPPVLDSDGSFFLYSKLTVSKSEWQQGFVFSCSVMHEALHNHYTQKSLSLSPGK

SEQ ID NO: 302 - protein, 217 aa, Artificial Sequence
  source: /note="Description of Artificial Sequence: Synthetic polypeptide"
APEAAGGPSVFLFPPKPKDTLYITREPEVTCVVVDVSHEDPEVKFNWYVDGVEVHNAKTKPREEQYNSTYRVVSVLTVLHQDWLNGKEYKCKVSNKALGAPIEKTISKAKGQPREPQVYTLPPSRDELTKNQVSLWCLVKGFYPSDIAVEWESYGTEWANYKTTPPVLDSDGSFFLYSKLTVSKSEWQQGFVFSCSVMHEALHNHYTQKSLSLSPGK

SEQ ID NO: 303 - protein, 217 aa, Artificial Sequence
  source: /note="Description of Artificial Sequence: Synthetic polypeptide"
APELLGGPSVFLFPPKPKDTLMISRTPEVTCVVVDVSHEDPEVKFNWYVDGVEVHNAKTKPREEQYNSTYRVVSVLTVLHQDWLNGKEYKCKVSNKALPAPIEKTISKAKGQPREPQVYTLPPSRDELTKNQVSLSCAVKGFYPSDIAVEWESYGTEWANYKTTPPVLDSDGSFFLVSKLTVSKSEWQQGFVFSCSVMHEALHNHYTQKSLSLSPGK

SEQ ID NO: 304 - protein, 217 aa, Artificial Sequence
  source: /note="Description of Artificial Sequence: Synthetic polypeptide"
APEAAGGPSVFLFPPKPKDTLMISRTPEVTCVVVDVSHEDPEVKFNWYVDGVEVHNAKTKPREEQYNSTYRVVSVLTVLHQDWLNGKEYKCKVSNKALPAPIEKTISKAKGQPREPQVYTLPPSRDELTKNQVSLSCAVKGFYPSDIAVEWESYGTEWANYKTTPPVLDSDGSFFLVSKLTVSKSEWQQGFVFSCSVMHEALHNHYTQKSLSLSPGK

SEQ ID NO: 305 - protein, 217 aa, Artificial Sequence
  source: /note="Description of Artificial Sequence: Synthetic polypeptide"
APEAAGGPSVFLFPPKPKDTLMISRTPEVTCVVVDVSHEDPEVKFNWYVDGVEVHNAKTKPREEQYNSTYRVVSVLTVLHQDWLNGKEYKCKVSNKALGAPIEKTISKAKGQPREPQVYTLPPSRDELTKNQVSLSCAVKGFYPSDIAVEWESYGTEWANYKTTPPVLDSDGSFFLVSKLTVSKSEWQQGFVFSCSVMHEALHNHYTQKSLSLSPGK

SEQ ID NO: 306 - protein, 217 aa, Artificial Sequence
  source: /note="Description of Artificial Sequence: Synthetic polypeptide"
APELLGGPSVFLFPPKPKDTLYITREPEVTCVVVDVSHEDPEVKFNWYVDGVEVHNAKTKPREEQYNSTYRVVSVLTVLHQDWLNGKEYKCKVSNKALPAPIEKTISKAKGQPREPQVYTLPPSRDELTKNQVSLSCAVKGFYPSDIAVEWESYGTEWANYKTTPPVLDSDGSFFLVSKLTVSKSEWQQGFVFSCSVMHEALHNHYTQKSLSLSPGK

SEQ ID NO: 307 - protein, 217 aa, Artificial Sequence
  source: /note="Description of Artificial Sequence: Synthetic polypeptide"
APEAAGGPSVFLFPPKPKDTLYITREPEVTCVVVDVSHEDPEVKFNWYVDGVEVHNAKTKPREEQYNSTYRVVSVLTVLHQDWLNGKEYKCKVSNKALPAPIEKTISKAKGQPREPQVYTLPPSRDELTKNQVSLSCAVKGFYPSDIAVEWESYGTEWANYKTTPPVLDSDGSFFLVSKLTVSKSEWQQGFVFSCSVMHEALHNHYTQKSLSLSPGK

SEQ ID NO: 308 - protein, 217 aa, Artificial Sequence
  source: /note="Description of Artificial Sequence: Synthetic polypeptide"
APEAAGGPSVFLFPPKPKDTLYITREPEVTCVVVDVSHEDPEVKFNWYVDGVEVHNAKTKPREEQYNSTYRVVSVLTVLHQDWLNGKEYKCKVSNKALGAPIEKTISKAKGQPREPQVYTLPPSRDELTKNQVSLSCAVKGFYPSDIAVEWESYGTEWANYKTTPPVLDSDGSFFLVSKLTVSKSEWQQGFVFSCSVMHEALHNHYTQKSLSLSPGK

SEQ ID NO: 309 - protein, 217 aa, Artificial Sequence
  source: /note="Description of Artificial Sequence: Synthetic polypeptide"
APELLGGPSVFLFPPKPKDTLMISRTPEVTCVVVDVSHEDPEVKFNWYVDGVEVHNAKTKPREEQYNSTYRVVSVLTVLHQDWLNGKEYKCKVSNKALPAPIEKTISKAKGQPREPQVYTLPPSRDELTKNQVSLWCLVKGFYPSDIAVEWESFGTEWSNYKTTPPVLDSDGSFFLYSKLTVSKEEWQQGFVFSCSVMHEALHNHYTQKSLSLSPGK

SEQ ID NO: 310 - protein, 217 aa, Artificial Sequence
  source: /note="Description of Artificial Sequence: Synthetic polypeptide"
APEAAGGPSVFLFPPKPKDTLMISRTPEVTCVVVDVSHEDPEVKFNWYVDGVEVHNAKTKPREEQYNSTYRVVSVLTVLHQDWLNGKEYKCKVSNKALPAPIEKTISKAKGQPREPQVYTLPPSRDELTKNQVSLWCLVKGFYPSDIAVEWESFGTEWSNYKTTPPVLDSDGSFFLYSKLTVSKEEWQQGFVFSCSVMHEALHNHYTQKSLSLSPGK

SEQ ID NO: 311 - protein, 217 aa, Artificial Sequence
  source: /note="Description of Artificial Sequence: Synthetic polypeptide"
APEAAGGPSVFLFPPKPKDTLMISRTPEVTCVVVDVSHEDPEVKFNWYVDGVEVHNAKTKPREEQYNSTYRVVSVLTVLHQDWLNGKEYKCKVSNKALGAPIEKTISKAKGQPREPQVYTLPPSRDELTKNQVSLWCLVKGFYPSDIAVEWESFGTEWSNYKTTPPVLDSDGSFFLYSKLTVSKEEWQQGFVFSCSVMHEALHNHYTQKSLSLSPGK

SEQ ID NO: 312 - protein, 217 aa, Artificial Sequence
  source: /note="Description of Artificial Sequence: Synthetic polypeptide"
APELLGGPSVFLFPPKPKDTLYITREPEVTCVVVDVSHEDPEVKFNWYVDGVEVHNAKTKPREEQYNSTYRVVSVLTVLHQDWLNGKEYKCKVSNKALPAPIEKTISKAKGQPREPQVYTLPPSRDELTKNQVSLWCLVKGFYPSDIAVEWESFGTEWSNYKTTPPVLDSDGSFFLYSKLTVSKEEWQQGFVFSCSVMHEALHNHYTQKSLSLSPGK

SEQ ID NO: 313 - protein, 217 aa, Artificial Sequence
  source: /note="Description of Artificial Sequence: Synthetic polypeptide"
APEAAGGPSVFLFPPKPKDTLYITREPEVTCVVVDVSHEDPEVKFNWYVDGVEVHNAKTKPREEQYNSTYRVVSVLTVLHQDWLNGKEYKCKVSNKALPAPIEKTISKAKGQPREPQVYTLPPSRDELTKNQVSLWCLVKGFYPSDIAVEWESFGTEWSNYKTTPPVLDSDGSFFLYSKLTVSKEEWQQGFVFSCSVMHEALHNHYTQKSLSLSPGK

SEQ ID NO: 314 - protein, 217 aa, Artificial Sequence
  source: /note="Description of Artificial Sequence: Synthetic polypeptide"
APEAAGGPSVFLFPPKPKDTLYITREPEVTCVVVDVSHEDPEVKFNWYVDGVEVHNAKTKPREEQYNSTYRVVSVLTVLHQDWLNGKEYKCKVSNKALGAPIEKTISKAKGQPREPQVYTLPPSRDELTKNQVSLWCLVKGFYPSDIAVEWESFGTEWSNYKTTPPVLDSDGSFFLYSKLTVSKEEWQQGFVFSCSVMHEALHNHYTQKSLSLSPGK

SEQ ID NO: 315 - protein, 217 aa, Artificial Sequence
  source: /note="Description of Artificial Sequence: Synthetic polypeptide"
APELLGGPSVFLFPPKPKDTLMISRTPEVTCVVVDVSHEDPEVKFNWYVDGVEVHNAKTKPREEQYNSTYRVVSVLTVLHQDWLNGKEYKCKVSNKALPAPIEKTISKAKGQPREPQVYTLPPSRDELTKNQVSLSCAVKGFYPSDIAVEWESFGTEWSNYKTTPPVLDSDGSFFLVSKLTVSKEEWQQGFVFSCSVMHEALHNHYTQKSLSLSPGK

SEQ ID NO: 316 - protein, 217 aa, Artificial Sequence
  source: /note="Description of Artificial Sequence: Synthetic polypeptide"
APEAAGGPSVFLFPPKPKDTLMISRTPEVTCVVVDVSHEDPEVKFNWYVDGVEVHNAKTKPREEQYNSTYRVVSVLTVLHQDWLNGKEYKCKVSNKALPAPIEKTISKAKGQPREPQVYTLPPSRDELTKNQVSLSCAVKGFYPSDIAVEWESFGTEWSNYKTTPPVLDSDGSFFLVSKLTVSKEEWQQGFVFSCSVMHEALHNHYTQKSLSLSPGK

SEQ ID NO: 317 - protein, 217 aa, Artificial Sequence
  source: /note="Description of Artificial Sequence: Synthetic polypeptide"
APEAAGGPSVFLFPPKPKDTLMISRTPEVTCVVVDVSHEDPEVKFNWYVDGVEVHNAKTKPREEQYNSTYRVVSVLTVLHQDWLNGKEYKCKVSNKALGAPIEKTISKAKGQPREPQVYTLPPSRDELTKNQVSLSCAVKGFYPSDIAVEWESFGTEWSNYKTTPPVLDSDGSFFLVSKLTVSKEEWQQGFVFSCSVMHEALHNHYTQKSLSLSPGK

SEQ ID NO: 318 - protein, 217 aa, Artificial Sequence
  source: /note="Description of Artificial Sequence: Synthetic polypeptide"
APELLGGPSVFLFPPKPKDTLYITREPEVTCVVVDVSHEDPEVKFNWYVDGVEVHNAKTKPREEQYNSTYRVVSVLTVLHQDWLNGKEYKCKVSNKALPAPIEKTISKAKGQPREPQVYTLPPSRDELTKNQVSLSCAVKGFYPSDIAVEWESFGTEWSNYKTTPPVLDSDGSFFLVSKLTVSKEEWQQGFVFSCSVMHEALHNHYTQKSLSLSPGK

SEQ ID NO: 319 - protein, 217 aa, Artificial Sequence
  source: /note="Description of Artificial Sequence: Synthetic polypeptide"
APEAAGGPSVFLFPPKPKDTLYITREPEVTCVVVDVSHEDPEVKFNWYVDGVEVHNAKTKPREEQYNSTYRVVSVLTVLHQDWLNGKEYKCKVSNKALPAPIEKTISKAKGQPREPQVYTLPPSRDELTKNQVSLSCAVKGFYPSDIAVEWESFGTEWSNYKTTPPVLDSDGSFFLVSKLTVSKEEWQQGFVFSCSVMHEALHNHYTQKSLSLSPGK

SEQ ID NO: 320 - protein, 217 aa, Artificial Sequence
  source: /note="Description of Artificial Sequence: Synthetic polypeptide"
APEAAGGPSVFLFPPKPKDTLYITREPEVTCVVVDVSHEDPEVKFNWYVDGVEVHNAKTKPREEQYNSTYRVVSVLTVLHQDWLNGKEYKCKVSNKALGAPIEKTISKAKGQPREPQVYTLPPSRDELTKNQVSLSCAVKGFYPSDIAVEWESFGTEWSNYKTTPPVLDSDGSFFLVSKLTVSKEEWQQGFVFSCSVMHEALHNHYTQKSLSLSPGK

SEQ ID NO: 321 - protein, 217 aa, Artificial Sequence
  source: /note="Description of Artificial Sequence: Synthetic polypeptide"
APELLGGPSVFLFPPKPKDTLMISRTPEVTCVVVDVSHEDPEVKFNWYVDGVEVHNAKTKPREEQYNSTYRVVSVLTVLHQDWLNGKEYKCKVSNKALPAPIEKTISKAKGQPREPQVYTLPPSRDELTKNQVSLTCLVKGFYPSDIAVEWESFGTEWSSYKTTPPVLDSDGSFFLYSKLTVTKEEWQQGFVFSCSVLHEALHSHYTQKSLSLSPGK

SEQ ID NO: 322 - protein, 217 aa, Artificial Sequence
  source: /note="Description of Artificial Sequence: Synthetic polypeptide"
APELLGGPSVFLFPPKPKDTLMISRTPEVTCVVVDVSHEDPEVKFNWYVDGVEVHNAKTKPREEQYNSTYRVVSVLTVLHQDWLNGKEYKCKVSNKALPAPIEKTISKAKGQPREPQVYTLPPSRDELTKNQVSLWCLVKGFYPSDIAVEWESFGTEWSSYKTTPPVLDSDGSFFLYSKLTVTKEEWQQGFVFSCSVLHEALHSHYTQKSLSLSPGK

SEQ ID NO: 323 - protein, 217 aa, Artificial Sequence
  source: /note="Description of Artificial Sequence: Synthetic polypeptide"
APEAAGGPSVFLFPPKPKDTLMISRTPEVTCVVVDVSHEDPEVKFNWYVDGVEVHNAKTKPREEQYNSTYRVVSVLTVLHQDWLNGKEYKCKVSNKALPAPIEKTISKAKGQPREPQVYTLPPSRDELTKNQVSLWCLVKGFYPSDIAVEWESFGTEWSSYKTTPPVLDSDGSFFLYSKLTVTKEEWQQGFVFSCSVLHEALHSHYTQKSLSLSPGK

SEQ ID NO: 324 - protein, 217 aa, Artificial Sequence
  source: /note="Description of Artificial Sequence: Synthetic polypeptide"
APEAAGGPSVFLFPPKPKDTLMISRTPEVTCVVVDVSHEDPEVKFNWYVDGVEVHNAKTKPREEQYNSTYRVVSVLTVLHQDWLNGKEYKCKVSNKALGAPIEKTISKAKGQPREPQVYTLPPSRDELTKNQVSLWCLVKGFYPSDIAVEWESFGTEWSSYKTTPPVLDSDGSFFLYSKLTVTKEEWQQGFVFSCSVLHEALHSHYTQKSLSLSPGK

SEQ ID NO: 325 - protein, 217 aa, Artificial Sequence
  source: /note="Description of Artificial Sequence: Synthetic polypeptide"
APELLGGPSVFLFPPKPKDTLMISRTPEVTCVVVDVSHEDPEVKFNWYVDGVEVHNAKTKPREEQYNSTYRVVSVLTVLHQDWLNGKEYKCKVSNKALPAPIEKTISKAKGQPREPQVYTLPPSRDELTKNQVSLSCAVKGFYPSDIAVEWESFGTEWSSYKTTPPVLDSDGSFFLVSKLTVTKEEWQQGFVFSCSVLHEALHSHYTQKSLSLSPGK

SEQ ID NO: 326 - protein, 217 aa, Artificial Sequence
  source: /note="Description of Artificial Sequence: Synthetic polypeptide"
APEAAGGPSVFLFPPKPKDTLMISRTPEVTCVVVDVSHEDPEVKFNWYVDGVEVHNAKTKPREEQYNSTYRVVSVLTVLHQDWLNGKEYKCKVSNKALPAPIEKTISKAKGQPREPQVYTLPPSRDELTKNQVSLSCAVKGFYPSDIAVEWESFGTEWSSYKTTPPVLDSDGSFFLVSKLTVTKEEWQQGFVFSCSVLHEALHSHYTQKSLSLSPGK

SEQ ID NO: 327 - protein, 217 aa, Artificial Sequence
  source: /note="Description of Artificial Sequence: Synthetic polypeptide"
APEAAGGPSVFLFPPKPKDTLMISRTPEVTCVVVDVSHEDPEVKFNWYVDGVEVHNAKTKPREEQYNSTYRVVSVLTVLHQDWLNGKEYKCKVSNKALGAPIEKTISKAKGQPREPQVYTLPPSRDELTKNQVSLSCAVKGFYPSDIAVEWESFGTEWSSYKTTPPVLDSDGSFFLVSKLTVTKEEWQQGFVFSCSVLHEALHSHYTQKSLSLSPGK

SEQ ID NO: 328 - protein, 217 aa, Artificial Sequence
  source: /note="Description of Artificial Sequence: Synthetic polypeptide"
APELLGGPSVFLFPPKPKDTLMISRTPEVTCVVVDVSHEDPEVKFNWYVDGVEVHNAKTKPREEQYNSTYRVVSVLTVLHQDWLNGKEYKCKVSNKALPAPIEKTISKAKGQPREPQVYTLPPSRDELTKNQVSLTCLVKGFYPSDIAVEWESYGTEWANYKTTPPVLDSDGSFFLYSKLTVTKEEWQQGFVFSCSVLHEALHSHYTQKSLSLSPGK

SEQ ID NO: 329 - protein, 217 aa, Artificial Sequence
  source: /note="Description of Artificial Sequence: Synthetic polypeptide"
APELLGGPSVFLFPPKPKDTLMISRTPEVTCVVVDVSHEDPEVKFNWYVDGVEVHNAKTKPREEQYNSTYRVVSVLTVLHQDWLNGKEYKCKVSNKALPAPIEKTISKAKGQPREPQVYTLPPSRDELTKNQVSLWCLVKGFYPSDIAVEWESYGTEWANYKTTPPVLDSDGSFFLYSKLTVTKEEWQQGFVFSCSVLHEALHSHYTQKSLSLSPGK

SEQ ID NO: 330 - protein, 217 aa, Artificial Sequence
  source: /note="Description of Artificial Sequence: Synthetic polypeptide"
APEAAGGPSVFLFPPKPKDTLMISRTPEVTCVVVDVSHEDPEVKFNWYVDGVEVHNAKTKPREEQYNSTYRVVSVLTVLHQDWLNGKEYKCKVSNKALPAPIEKTISKAKGQPREPQVYTLPPSRDELTKNQVSLWCLVKGFYPSDIAVEWESYGTEWANYKTTPPVLDSDGSFFLYSKLTVTKEEWQQGFVFSCSVLHEALHSHYTQKSLSLSPGK

SEQ ID NO: 331 - protein, 217 aa, Artificial Sequence
  source: /note="Description of Artificial Sequence: Synthetic polypeptide"
APEAAGGPSVFLFPPKPKDTLMISRTPEVTCVVVDVSHEDPEVKFNWYVDGVEVHNAKTKPREEQYNSTYRVVSVLTVLHQDWLNGKEYKCKVSNKALGAPIEKTISKAKGQPREPQVYTLPPSRDELTKNQVSLWCLVKGFYPSDIAVEWESYGTEWANYKTTPPVLDSDGSFFLYSKLTVTKEEWQQGFVFSCSVLHEALHSHYTQKSLSLSPGK

SEQ ID NO: 332 - protein, 217 aa, Artificial Sequence
  source: /note="Description of Artificial Sequence: Synthetic polypeptide"
APELLGGPSVFLFPPKPKDTLMISRTPEVTCVVVDVSHEDPEVKFNWYVDGVEVHNAKTKPREEQYNSTYRVVSVLTVLHQDWLNGKEYKCKVSNKALPAPIEKTISKAKGQPREPQVYTLPPSRDELTKNQVSLSCAVKGFYPSDIAVEWESYGTEWANYKTTPPVLDSDGSFFLVSKLTVTKEEWQQGFVFSCSVLHEALHSHYTQKSLSLSPGK

SEQ ID NO: 333 - protein, 217 aa, Artificial Sequence
  source: /note="Description of Artificial Sequence: Synthetic polypeptide"
APEAAGGPSVFLFPPKPKDTLMISRTPEVTCVVVDVSHEDPEVKFNWYVDGVEVHNAKTKPREEQYNSTYRVVSVLTVLHQDWLNGKEYKCKVSNKALPAPIEKTISKAKGQPREPQVYTLPPSRDELTKNQVSLSCAVKGFYPSDIAVEWESYGTEWANYKTTPPVLDSDGSFFLVSKLTVTKEEWQQGFVFSCSVLHEALHSHYTQKSLSLSPGK

SEQ ID NO: 334 - protein, 217 aa, Artificial Sequence
  source: /note="Description of Artificial Sequence: Synthetic polypeptide"
APEAAGGPSVFLFPPKPKDTLMISRTPEVTCVVVDVSHEDPEVKFNWYVDGVEVHNAKTKPREEQYNSTYRVVSVLTVLHQDWLNGKEYKCKVSNKALGAPIEKTISKAKGQPREPQVYTLPPSRDELTKNQVSLSCAVKGFYPSDIAVEWESYGTEWANYKTTPPVLDSDGSFFLVSKLTVTKEEWQQGFVFSCSVLHEALHSHYTQKSLSLSPGK

SEQ ID NO: 335 - protein, 217 aa, Artificial Sequence
  source: /note="Description of Artificial Sequence: Synthetic polypeptide"
APELLGGPSVFLFPPKPKDTLMISRTPEVTCVVVDVSHEDPEVKFNWYVDGVEVHNAKTKPREEQYNSTYRVVSVLTVLHQDWLNGKEYKCKVSNKALPAPIEKTISKAKGQPREPQVYTLPPSRDELTKNQVSLTCLVKGFYPSDIAVEWESYGTEWVNYKTTPPVLDSDGSFFLYSKLTVTKEEWQQGFVFSCSVLHEALHSHYTQKSLSLSPGK

SEQ ID NO: 336 - protein, 217 aa, Artificial Sequence
  source: /note="Description of Artificial Sequence: Synthetic polypeptide"
APELLGGPSVFLFPPKPKDTLMISRTPEVTCVVVDVSHEDPEVKFNWYVDGVEVHNAKTKPREEQYNSTYRVVSVLTVLHQDWLNGKEYKCKVSNKALPAPIEKTISKAKGQPREPQVYTLPPSRDELTKNQVSLWCLVKGFYPSDIAVEWESYGTEWVNYKTTPPVLDSDGSFFLYSKLTVTKEEWQQGFVFSCSVLHEALHSHYTQKSLSLSPGK

SEQ ID NO: 337 - protein, 217 aa, Artificial Sequence
  source: /note="Description of Artificial Sequence: Synthetic polypeptide"
APEAAGGPSVFLFPPKPKDTLMISRTPEVTCVVVDVSHEDPEVKFNWYVDGVEVHNAKTKPREEQYNSTYRVVSVLTVLHQDWLNGKEYKCKVSNKALPAPIEKTISKAKGQPREPQVYTLPPSRDELTKNQVSLWCLVKGFYPSDIAVEWESYGTEWVNYKTTPPVLDSDGSFFLYSKLTVTKEEWQQGFVFSCSVLHEALHSHYTQKSLSLSPGK

SEQ ID NO: 338 - protein, 217 aa, Artificial Sequence
  source: /note="Description of Artificial Sequence: Synthetic polypeptide"
APEAAGGPSVFLFPPKPKDTLMISRTPEVTCVVVDVSHEDPEVKFNWYVDGVEVHNAKTKPREEQYNSTYRVVSVLTVLHQDWLNGKEYKCKVSNKALGAPIEKTISKAKGQPREPQVYTLPPSRDELTKNQVSLWCLVKGFYPSDIAVEWESYGTEWVNYKTTPPVLDSDGSFFLYSKLTVTKEEWQQGFVFSCSVLHEALHSHYTQKSLSLSPGK

SEQ ID NO: 339 - protein, 217 aa, Artificial Sequence
  source: /note="Description of Artificial Sequence: Synthetic polypeptide"
APELLGGPSVFLFPPKPKDTLMISRTPEVTCVVVDVSHEDPEVKFNWYVDGVEVHNAKTKPREEQYNSTYRVVSVLTVLHQDWLNGKEYKCKVSNKALPAPIEKTISKAKGQPREPQVYTLPPSRDELTKNQVSLSCAVKGFYPSDIAVEWESYGTEWVNYKTTPPVLDSDGSFFLVSKLTVTKEEWQQGFVFSCSVLHEALHSHYTQKSLSLSPGK

SEQ ID NO: 340 - protein, 217 aa, Artificial Sequence
  source: /note="Description of Artificial Sequence: Synthetic polypeptide"
APEAAGGPSVFLFPPKPKDTLMISRTPEVTCVVVDVSHEDPEVKFNWYVDGVEVHNAKTKPREEQYNSTYRVVSVLTVLHQDWLNGKEYKCKVSNKALPAPIEKTISKAKGQPREPQVYTLPPSRDELTKNQVSLSCAVKGFYPSDIAVEWESYGTEWVNYKTTPPVLDSDGSFFLVSKLTVTKEEWQQGFVFSCSVLHEALHSHYTQKSLSLSPGK

SEQ ID NO: 341 - protein, 217 aa, Artificial Sequence
  source: /note="Description of Artificial Sequence: Synthetic polypeptide"
APEAAGGPSVFLFPPKPKDTLMISRTPEVTCVVVDVSHEDPEVKFNWYVDGVEVHNAKTKPREEQYNSTYRVVSVLTVLHQDWLNGKEYKCKVSNKALGAPIEKTISKAKGQPREPQVYTLPPSRDELTKNQVSLSCAVKGFYPSDIAVEWESYGTEWVNYKTTPPVLDSDGSFFLVSKLTVTKEEWQQGFVFSCSVLHEALHSHYTQKSLSLSPGK

SEQ ID NO: 342 - protein, 217 aa, Artificial Sequence
  source: /note="Description of Artificial Sequence: Synthetic polypeptide"
APELLGGPSVFLFPPKPKDTLMISRTPEVTCVVVDVSHEDPEVKFNWYVDGVEVHNAKTKPREEQYNSTYRVVSVLTVLHQDWLNGKEYKCKVSNKALPAPIEKTISKAKGQPREPQVYTLPPSRDELTKNQVSLTCLVKGFYPSDIAVEWESYGTEWSNYKTTPPVLDSDGSFFLYSKLTVSKEEWQQGFVFSCSVLHEALHSHYTQKSLSLSPGK

SEQ ID NO: 343 - protein, 217 aa, Artificial Sequence
  source: /note="Description of Artificial Sequence: Synthetic polypeptide"
APELLGGPSVFLFPPKPKDTLMISRTPEVTCVVVDVSHEDPEVKFNWYVDGVEVHNAKTKPREEQYNSTYRVVSVLTVLHQDWLNGKEYKCKVSNKALPAPIEKTISKAKGQPREPQVYTLPPSRDELTKNQVSLWCLVKGFYPSDIAVEWESYGTEWSNYKTTPPVLDSDGSFFLYSKLTVSKEEWQQGFVFSCSVLHEALHSHYTQKSLSLSPGK

SEQ ID NO: 344 - protein, 217 aa, Artificial Sequence
  source: /note="Description of Artificial Sequence: Synthetic polypeptide"
APEAAGGPSVFLFPPKPKDTLMISRTPEVTCVVVDVSHEDPEVKFNWYVDGVEVHNAKTKPREEQYNSTYRVVSVLTVLHQDWLNGKEYKCKVSNKALPAPIEKTISKAKGQPREPQVYTLPPSRDELTKNQVSLWCLVKGFYPSDIAVEWESYGTEWSNYKTTPPVLDSDGSFFLYSKLTVSKEEWQQGFVFSCSVLHEALHSHYTQKSLSLSPGK

SEQ ID NO: 345 - protein, 217 aa, Artificial Sequence
  source: /note="Description of Artificial Sequence: Synthetic polypeptide"
APEAAGGPSVFLFPPKPKDTLMISRTPEVTCVVVDVSHEDPEVKFNWYVDGVEVHNAKTKPREEQYNSTYRVVSVLTVLHQDWLNGKEYKCKVSNKALGAPIEKTISKAKGQPREPQVYTLPPSRDELTKNQVSLWCLVKGFYPSDIAVEWESYGTEWSNYKTTPPVLDSDGSFFLYSKLTVSKEEWQQGFVFSCSVLHEALHSHYTQKSLSLSPGK

SEQ ID NO: 346 - protein, 217 aa, Artificial Sequence
  source: /note="Description of Artificial Sequence: Synthetic polypeptide"
APELLGGPSVFLFPPKPKDTLMISRTPEVTCVVVDVSHEDPEVKFNWYVDGVEVHNAKTKPREEQYNSTYRVVSVLTVLHQDWLNGKEYKCKVSNKALPAPIEKTISKAKGQPREPQVYTLPPSRDELTKNQVSLSCAVKGFYPSDIAVEWESYGTEWSNYKTTPPVLDSDGSFFLVSKLTVSKEEWQQGFVFSCSVLHEALHSHYTQKSLSLSPGK

SEQ ID NO: 347 - protein, 217 aa, Artificial Sequence
  source: /note="Description of Artificial Sequence: Synthetic polypeptide"
APEAAGGPSVFLFPPKPKDTLMISRTPEVTCVVVDVSHEDPEVKFNWYVDGVEVHNAKTKPREEQYNSTYRVVSVLTVLHQDWLNGKEYKCKVSNKALPAPIEKTISKAKGQPREPQVYTLPPSRDELTKNQVSLSCAVKGFYPSDIAVEWESYGTEWSNYKTTPPVLDSDGSFFLVSKLTVSKEEWQQGFVFSCSVLHEALHSHYTQKSLSLSPGK

SEQ ID NO: 348 - protein, 217 aa, Artificial Sequence
  source: /note="Description of Artificial Sequence: Synthetic polypeptide"
APEAAGGPSVFLFPPKPKDTLMISRTPEVTCVVVDVSHEDPEVKFNWYVDGVEVHNAKTKPREEQYNSTYRVVSVLTVLHQDWLNGKEYKCKVSNKALGAPIEKTISKAKGQPREPQVYTLPPSRDELTKNQVSLSCAVKGFYPSDIAVEWESYGTEWSNYKTTPPVLDSDGSFFLVSKLTVSKEEWQQGFVFSCSVLHEALHSHYTQKSLSLSPGK

SEQ ID NO: 349 - protein, 217 aa, Artificial Sequence
  source: /note="Description of Artificial Sequence: Synthetic polypeptide"
APELLGGPSVFLFPPKPKDTLMISRTPEVTCVVVDVSHEDPEVKFNWYVDGVEVHNAKTKPREEQYNSTYRVVSVLTVLHQDWLNGKEYKCKVSNKALPAPIEKTISKAKGQPREPQVYTLPPSRDELTKNQVSLTCLVKGFYPSDIAVLWESYGTEWASYKTTPPVLDSDGSFFLYSKLTVTKEEWQQGFVFSCSVLHEALHSHYTQKSLSLSPGK

SEQ ID NO: 350 - protein, 217 aa, Artificial Sequence
  source: /note="Description of Artificial Sequence: Synthetic polypeptide"
APELLGGPSVFLFPPKPKDTLMISRTPEVTCVVVDVSHEDPEVKFNWYVDGVEVHNAKTKPREEQYNSTYRVVSVLTVLHQDWLNGKEYKCKVSNKALPAPIEKTISKAKGQPREPQVYTLPPSRDELTKNQVSLWCLVKGFYPSDIAVLWESYGTEWASYKTTPPVLDSDGSFFLYSKLTVTKEEWQQGFVFSCSVLHEALHSHYTQKSLSLSPGK

SEQ ID NO: 351 - protein, 217 aa, Artificial Sequence
  source: /note="Description of Artificial Sequence: Synthetic polypeptide"
APEAAGGPSVFLFPPKPKDTLMISRTPEVTCVVVDVSHEDPEVKFNWYVDGVEVHNAKTKPREEQYNSTYRVVSVLTVLHQDWLNGKEYKCKVSNKALPAPIEKTISKAKGQPREPQVYTLPPSRDELTKNQVSLWCLVKGFYPSDIAVLWESYGTEWASYKTTPPVLDSDGSFFLYSKLTVTKEEWQQGFVFSCSVLHEALHSHYTQKSLSLSPGK

SEQ ID NO: 352 - protein, 217 aa, Artificial Sequence
  source: /note="Description of Artificial Sequence: Synthetic polypeptide"
APEAAGGPSVFLFPPKPKDTLMISRTPEVTCVVVDVSHEDPEVKFNWYVDGVEVHNAKTKPREEQYNSTYRVVSVLTVLHQDWLNGKEYKCKVSNKALGAPIEKTISKAKGQPREPQVYTLPPSRDELTKNQVSLWCLVKGFYPSDIAVLWESYGTEWASYKTTPPVLDSDGSFFLYSKLTVTKEEWQQGFVFSCSVLHEALHSHYTQKSLSLSPGK

SEQ ID NO: 353 - protein, 217 aa, Artificial Sequence
  source: /note="Description of Artificial Sequence: Synthetic polypeptide"
APELLGGPSVFLFPPKPKDTLMISRTPEVTCVVVDVSHEDPEVKFNWYVDGVEVHNAKTKPREEQYNSTYRVVSVLTVLHQDWLNGKEYKCKVSNKALPAPIEKTISKAKGQPREPQVYTLPPSRDELTKNQVSLSCAVKGFYPSDIAVLWESYGTEWASYKTTPPVLDSDGSFFLVSKLTVTKEEWQQGFVFSCSVLHEALHSHYTQKSLSLSPGK

SEQ ID NO: 354 - protein, 217 aa, Artificial Sequence
  source: /note="Description of Artificial Sequence: Synthetic polypeptide"
APEAAGGPSVFLFPPKPKDTLMISRTPEVTCVVVDVSHEDPEVKFNWYVDGVEVHNAKTKPREEQYNSTYRVVSVLTVLHQDWLNGKEYKCKVSNKALPAPIEKTISKAKGQPREPQVYTLPPSRDELTKNQVSLSCAVKGFYPSDIAVLWESYGTEWASYKTTPPVLDSDGSFFLVSKLTVTKEEWQQGFVFSCSVLHEALHSHYTQKSLSLSPGK

SEQ ID NO: 355 - protein, 217 aa, Artificial Sequence
  source: /note="Description of Artificial Sequence: Synthetic polypeptide"
APEAAGGPSVFLFPPKPKDTLMISRTPEVTCVVVDVSHEDPEVKFNWYVDGVEVHNAKTKPREEQYNSTYRVVSVLTVLHQDWLNGKEYKCKVSNKALGAPIEKTISKAKGQPREPQVYTLPPSRDELTKNQVSLSCAVKGFYPSDIAVLWESYGTEWASYKTTPPVLDSDGSFFLVSKLTVTKEEWQQGFVFSCSVLHEALHSHYTQKSLSLSPGK

SEQ ID NO: 356 - protein, 217 aa, Artificial Sequence
  source: /note="Description of Artificial Sequence: Synthetic polypeptide"
APELLGGPSVFLFPPKPKDTLMISRTPEVTCVVVDVSHEDPEVKFNWYVDGVEVHNAKTKPREEQYNSTYRVVSVLTVLHQDWLNGKEYKCKVSNKALPAPIEKTISKAKGQPREPQVYTLPPSRDELTKNQVSLTCLVKGFYPSDIAVEWESYGTEWSNYKTTPPVLDSDGSFFLYSKLTVTKEEWQQGFVFSCSVLHEALHSHYTQKSLSLSPGK

SEQ ID NO: 357 - protein, 217 aa, Artificial Sequence
  source: /note="Description of Artificial Sequence: Synthetic polypeptide"
APELLGGPSVFLFPPKPKDTLMISRTPEVTCVVVDVSHEDPEVKFNWYVDGVEVHNAKTKPREEQYNSTYRVVSVLTVLHQDWLNGKEYKCKVSNKALPAPIEKTISKAKGQPREPQVYTLPPSRDELTKNQVSLWCLVKGFYPSDIAVEWESYGTEWSNYKTTPPVLDSDGSFFLYSKLTVTKEEWQQGFVFSCSVLHEALHSHYTQKSLSLSPGK

SEQ ID NO: 358 - protein, 217 aa, Artificial Sequence
  source: /note="Description of Artificial Sequence: Synthetic polypeptide"
APEAAGGPSVFLFPPKPKDTLMISRTPEVTCVVVDVSHEDPEVKFNWYVDGVEVHNAKTKPREEQYNSTYRVVSVLTVLHQDWLNGKEYKCKVSNKALPAPIEKTISKAKGQPREPQVYTLPPSRDELTKNQVSLWCLVKGFYPSDIAVEWESYGTEWSNYKTTPPVLDSDGSFFLYSKLTVTKEEWQQGFVFSCSVLHEALHSHYTQKSLSLSPGK

SEQ ID NO: 359 - protein, 217 aa, Artificial Sequence
  source: /note="Description of Artificial Sequence: Synthetic polypeptide"
APEAAGGPSVFLFPPKPKDTLMISRTPEVTCVVVDVSHEDPEVKFNWYVDGVEVHNAKTKPREEQYNSTYRVVSVLTVLHQDWLNGKEYKCKVSNKALGAPIEKTISKAKGQPREPQVYTLPPSRDELTKNQVSLWCLVKGFYPSDIAVEWESYGTEWSNYKTTPPVLDSDGSFFLYSKLTVTKEEWQQGFVFSCSVLHEALHSHYTQKSLSLSPGK

SEQ ID NO: 360 - protein, 217 aa, Artificial Sequence
  source: /note="Description of Artificial Sequence: Synthetic polypeptide"
APELLGGPSVFLFPPKPKDTLMISRTPEVTCVVVDVSHEDPEVKFNWYVDGVEVHNAKTKPREEQYNSTYRVVSVLTVLHQDWLNGKEYKCKVSNKALPAPIEKTISKAKGQPREPQVYTLPPSRDELTKNQVSLSCAVKGFYPSDIAVEWESYGTEWSNYKTTPPVLDSDGSFFLVSKLTVTKEEWQQGFVFSCSVLHEALHSHYTQKSLSLSPGK

SEQ ID NO: 361 - protein, 217 aa, Artificial Sequence
  source: /note="Description of Artificial Sequence: Synthetic polypeptide"
APEAAGGPSVFLFPPKPKDTLMISRTPEVTCVVVDVSHEDPEVKFNWYVDGVEVHNAKTKPREEQYNSTYRVVSVLTVLHQDWLNGKEYKCKVSNKALPAPIEKTISKAKGQPREPQVYTLPPSRDELTKNQVSLSCAVKGFYPSDIAVEWESYGTEWSNYKTTPPVLDSDGSFFLVSKLTVTKEEWQQGFVFSCSVLHEALHSHYTQKSLSLSPGK

SEQ ID NO: 362 - protein, 217 aa, Artificial Sequence
  source: /note="Description of Artificial Sequence: Synthetic polypeptide"
APEAAGGPSVFLFPPKPKDTLMISRTPEVTCVVVDVSHEDPEVKFNWYVDGVEVHNAKTKPREEQYNSTYRVVSVLTVLHQDWLNGKEYKCKVSNKALGAPIEKTISKAKGQPREPQVYTLPPSRDELTKNQVSLSCAVKGFYPSDIAVEWESYGTEWSNYKTTPPVLDSDGSFFLVSKLTVTKEEWQQGFVFSCSVLHEALHSHYTQKSLSLSPGK

SEQ ID NO: 363 - protein, 217 aa, Artificial Sequence
  source: /note="Description of Artificial Sequence: Synthetic polypeptide"
APELLGGPSVFLFPPKPKDTLMISRTPEVTCVVVDVSHEDPEVKFNWYVDGVEVHNAKTKPREEQYNSTYRVVSVLTVLHQDWLNGKEYKCKVSNKALPAPIEKTISKAKGQPREPQVYTLPPSRDELTKNQVSLTCLVKGFYPSDIAVWWESYGTEWSSYKTTPPVLDSDGSFFLYSKLTVTKEEWQQGFVFSCSVLHEALHSHYTQKSLSLSPGK

SEQ ID NO: 364 - protein, 217 aa, Artificial Sequence
  source: /note="Description of Artificial Sequence: Synthetic polypeptide"
APELLGGPSVFLFPPKPKDTLMISRTPEVTCVVVDVSHEDPEVKFNWYVDGVEVHNAKTKPREEQYNSTYRVVSVLTVLHQDWLNGKEYKCKVSNKALPAPIEKTISKAKGQPREPQVYTLPPSRDELTKNQVSLWCLVKGFYPSDIAVWWESYGTEWSSYKTTPPVLDSDGSFFLYSKLTVTKEEWQQGFVFSCSVLHEALHSHYTQKSLSLSPGK

SEQ ID NO: 365 - protein, 217 aa, Artificial Sequence
  source: /note="Description of Artificial Sequence: Synthetic polypeptide"
APEAAGGPSVFLFPPKPKDTLMISRTPEVTCVVVDVSHEDPEVKFNWYVDGVEVHNAKTKPREEQYNSTYRVVSVLTVLHQDWLNGKEYKCKVSNKALPAPIEKTISKAKGQPREPQVYTLPPSRDELTKNQVSLWCLVKGFYPSDIAVWWESYGTEWSSYKTTPPVLDSDGSFFLYSKLTVTKEEWQQGFVFSCSVLHEALHSHYTQKSLSLSPGK

SEQ ID NO: 366 - protein, 217 aa, Artificial Sequence
  source: /note="Description of Artificial Sequence: Synthetic polypeptide"
APEAAGGPSVFLFPPKPKDTLMISRTPEVTCVVVDVSHEDPEVKFNWYVDGVEVHNAKTKPREEQYNSTYRVVSVLTVLHQDWLNGKEYKCKVSNKALGAPIEKTISKAKGQPREPQVYTLPPSRDELTKNQVSLWCLVKGFYPSDIAVWWESYGTEWSSYKTTPPVLDSDGSFFLYSKLTVTKEEWQQGFVFSCSVLHEALHSHYTQKSLSLSPGK

SEQ ID NO: 367 - protein, 217 aa, Artificial Sequence
  source: /note="Description of Artificial Sequence: Synthetic polypeptide"
APELLGGPSVFLFPPKPKDTLMISRTPEVTCVVVDVSHEDPEVKFNWYVDGVEVHNAKTKPREEQYNSTYRVVSVLTVLHQDWLNGKEYKCKVSNKALPAPIEKTISKAKGQPREPQVYTLPPSRDELTKNQVSLSCAVKGFYPSDIAVWWESYGTEWSSYKTTPPVLDSDGSFFLVSKLTVTKEEWQQGFVFSCSVLHEALHSHYTQKSLSLSPGK

SEQ ID NO: 368 - protein, 217 aa, Artificial Sequence
  source: /note="Description of Artificial Sequence: Synthetic polypeptide"
APEAAGGPSVFLFPPKPKDTLMISRTPEVTCVVVDVSHEDPEVKFNWYVDGVEVHNAKTKPREEQYNSTYRVVSVLTVLHQDWLNGKEYKCKVSNKALPAPIEKTISKAKGQPREPQVYTLPPSRDELTKNQVSLSCAVKGFYPSDIAVWWESYGTEWSSYKTTPPVLDSDGSFFLVSKLTVTKEEWQQGFVFSCSVLHEALHSHYTQKSLSLSPGK

SEQ ID NO: 369 - protein, 217 aa, Artificial Sequence
  source: /note="Description of Artificial Sequence: Synthetic polypeptide"
APEAAGGPSVFLFPPKPKDTLMISRTPEVTCVVVDVSHEDPEVKFNWYVDGVEVHNAKTKPREEQYNSTYRVVSVLTVLHQDWLNGKEYKCKVSNKALGAPIEKTISKAKGQPREPQVYTLPPSRDELTKNQVSLSCAVKGFYPSDIAVWWESYGTEWSSYKTTPPVLDSDGSFFLVSKLTVTKEEWQQGFVFSCSVLHEALHSHYTQKSLSLSPGK

SEQ ID NO: 370 - protein, 217 aa, Artificial Sequence
  source: /note="Description of Artificial Sequence: Synthetic polypeptide"
APELLGGPSVFLFPPKPKDTLMISRTPEVTCVVVDVSHEDPEVKFNWYVDGVEVHNAKTKPREEQYNSTYRVVSVLTVLHQDWLNGKEYKCKVSNKALPAPIEKTISKAKGQPREPQVYTLPPSRDELTKNQVSLTCLVKGFYPSDIAVEWESFGTEWSSYKTTPPVLDSDGSFFLYSKLTVSKEEWQQGFVFSCSVLHEALHSHYTQKSLSLSPGK

SEQ ID NO: 371 - protein, 217 aa, Artificial Sequence
  source: /note="Description of Artificial Sequence: Synthetic polypeptide"
APELLGGPSVFLFPPKPKDTLMISRTPEVTCVVVDVSHEDPEVKFNWYVDGVEVHNAKTKPREEQYNSTYRVVSVLTVLHQDWLNGKEYKCKVSNKALPAPIEKTISKAKGQPREPQVYTLPPSRDELTKNQVSLWCLVKGFYPSDIAVEWESFGTEWSSYKTTPPVLDSDGSFFLYSKLTVSKEEWQQGFVFSCSVLHEALHSHYTQKSLSLSPGK

SEQ ID NO: 372 - protein, 217 aa, Artificial Sequence
  source: /note="Description of Artificial Sequence: Synthetic polypeptide"
APEAAGGPSVFLFPPKPKDTLMISRTPEVTCVVVDVSHEDPEVKFNWYVDGVEVHNAKTKPREEQYNSTYRVVSVLTVLHQDWLNGKEYKCKVSNKALPAPIEKTISKAKGQPREPQVYTLPPSRDELTKNQVSLWCLVKGFYPSDIAVEWESFGTEWSSYKTTPPVLDSDGSFFLYSKLTVSKEEWQQGFVFSCSVLHEALHSHYTQKSLSLSPGK

SEQ ID NO: 373 - protein, 217 aa, Artificial Sequence
  source: /note="Description of Artificial Sequence: Synthetic polypeptide"
APEAAGGPSVFLFPPKPKDTLMISRTPEVTCVVVDVSHEDPEVKFNWYVDGVEVHNAKTKPREEQYNSTYRVVSVLTVLHQDWLNGKEYKCKVSNKALGAPIEKTISKAKGQPREPQVYTLPPSRDELTKNQVSLWCLVKGFYPSDIAVEWESFGTEWSSYKTTPPVLDSDGSFFLYSKLTVSKEEWQQGFVFSCSVLHEALHSHYTQKSLSLSPGK

SEQ ID NO: 374 - protein, 217 aa, Artificial Sequence
  source: /note="Description of Artificial Sequence: Synthetic polypeptide"
APELLGGPSVFLFPPKPKDTLMISRTPEVTCVVVDVSHEDPEVKFNWYVDGVEVHNAKTKPREEQYNSTYRVVSVLTVLHQDWLNGKEYKCKVSNKALPAPIEKTISKAKGQPREPQVYTLPPSRDELTKNQVSLSCAVKGFYPSDIAVEWESFGTEWSSYKTTPPVLDSDGSFFLVSKLTVSKEEWQQGFVFSCSVLHEALHSHYTQKSLSLSPGK

SEQ ID NO: 375 - protein, 217 aa, Artificial Sequence
  source: /note="Description of Artificial Sequence: Synthetic polypeptide"
APEAAGGPSVFLFPPKPKDTLMISRTPEVTCVVVDVSHEDPEVKFNWYVDGVEVHNAKTKPREEQYNSTYRVVSVLTVLHQDWLNGKEYKCKVSNKALPAPIEKTISKAKGQPREPQVYTLPPSRDELTKNQVSLSCAVKGFYPSDIAVEWESFGTEWSSYKTTPPVLDSDGSFFLVSKLTVSKEEWQQGFVFSCSVLHEALHSHYTQKSLSLSPGK

SEQ ID NO: 376 - protein, 217 aa, Artificial Sequence
  source: /note="Description of Artificial Sequence: Synthetic polypeptide"
APEAAGGPSVFLFPPKPKDTLMISRTPEVTCVVVDVSHEDPEVKFNWYVDGVEVHNAKTKPREEQYNSTYRVVSVLTVLHQDWLNGKEYKCKVSNKALGAPIEKTISKAKGQPREPQVYTLPPSRDELTKNQVSLSCAVKGFYPSDIAVEWESFGTEWSSYKTTPPVLDSDGSFFLVSKLTVSKEEWQQGFVFSCSVLHEALHSHYTQKSLSLSPGK

SEQ ID NO: 377 - protein, 217 aa, Artificial Sequence
  source: /note="Description of Artificial Sequence: Synthetic polypeptide"
APELLGGPSVFLFPPKPKDTLMISRTPEVTCVVVDVSHEDPEVKFNWYVDGVEVHNAKTKPREEQYNSTYRVVSVLTVLHQDWLNGKEYKCKVSNKALPAPIEKTISKAKGQPREPQVYTLPPSRDELTKNQVSLTCLVKGFYPSDIAVEWESYGTEWANYKTTPPVLDSDGSFFLYSKLTVSKSEWQQGFVFSCSVLHEALHSHYTQKSLSLSPGK

SEQ ID NO: 378 - protein, 217 aa, Artificial Sequence
  source: /note="Description of Artificial Sequence: Synthetic polypeptide"
APELLGGPSVFLFPPKPKDTLMISRTPEVTCVVVDVSHEDPEVKFNWYVDGVEVHNAKTKPREEQYNSTYRVVSVLTVLHQDWLNGKEYKCKVSNKALPAPIEKTISKAKGQPREPQVYTLPPSRDELTKNQVSLWCLVKGFYPSDIAVEWESYGTEWANYKTTPPVLDSDGSFFLYSKLTVSKSEWQQGFVFSCSVLHEALHSHYTQKSLSLSPGK

SEQ ID NO: 379 - protein, 217 aa, Artificial Sequence
  source: /note="Description of Artificial Sequence: Synthetic polypeptide"
APEAAGGPSVFLFPPKPKDTLMISRTPEVTCVVVDVSHEDPEVKFNWYVDGVEVHNAKTKPREEQYNSTYRVVSVLTVLHQDWLNGKEYKCKVSNKALPAPIEKTISKAKGQPREPQVYTLPPSRDELTKNQVSLWCLVKGFYPSDIAVEWESYGTEWANYKTTPPVLDSDGSFFLYSKLTVSKSEWQQGFVFSCSVLHEALHSHYTQKSLSLSPGK

SEQ ID NO: 380 - protein, 217 aa, Artificial Sequence
  source: /note="Description of Artificial Sequence: Synthetic polypeptide"
APEAAGGPSVFLFPPKPKDTLMISRTPEVTCVVVDVSHEDPEVKFNWYVDGVEVHNAKTKPREEQYNSTYRVVSVLTVLHQDWLNGKEYKCKVSNKALGAPIEKTISKAKGQPREPQVYTLPPSRDELTKNQVSLWCLVKGFYPSDIAVEWESYGTEWANYKTTPPVLDSDGSFFLYSKLTVSKSEWQQGFVFSCSVLHEALHSHYTQKSLSLSPGK

SEQ ID NO: 381 - protein, 217 aa, Artificial Sequence
  source: /note="Description of Artificial Sequence: Synthetic polypeptide"
APELLGGPSVFLFPPKPKDTLMISRTPEVTCVVVDVSHEDPEVKFNWYVDGVEVHNAKTKPREEQYNSTYRVVSVLTVLHQDWLNGKEYKCKVSNKALPAPIEKTISKAKGQPREPQVYTLPPSRDELTKNQVSLSCAVKGFYPSDIAVEWESYGTEWANYKTTPPVLDSDGSFFLVSKLTVSKSEWQQGFVFSCSVLHEALHSHYTQKSLSLSPGK

SEQ ID NO: 382 - protein, 217 aa, Artificial Sequence
  source: /note="Description of Artificial Sequence: Synthetic polypeptide"
APEAAGGPSVFLFPPKPKDTLMISRTPEVTCVVVDVSHEDPEVKFNWYVDGVEVHNAKTKPREEQYNSTYRVVSVLTVLHQDWLNGKEYKCKVSNKALPAPIEKTISKAKGQPREPQVYTLPPSRDELTKNQVSLSCAVKGFYPSDIAVEWESYGTEWANYKTTPPVLDSDGSFFLVSKLTVSKSEWQQGFVFSCSVLHEALHSHYTQKSLSLSPGK

SEQ ID NO: 383 - protein, 217 aa, Artificial Sequence
  source: /note="Description of Artificial Sequence: Synthetic polypeptide"
APEAAGGPSVFLFPPKPKDTLMISRTPEVTCVVVDVSHEDPEVKFNWYVDGVEVHNAKTKPREEQYNSTYRVVSVLTVLHQDWLNGKEYKCKVSNKALGAPIEKTISKAKGQPREPQVYTLPPSRDELTKNQVSLSCAVKGFYPSDIAVEWESYGTEWANYKTTPPVLDSDGSFFLVSKLTVSKSEWQQGFVFSCSVLHEALHSHYTQKSLSLSPGK

SEQ ID NO: 384 - protein, 217 aa, Artificial Sequence
  source: /note="Description of Artificial Sequence: Synthetic polypeptide"
APELLGGPSVFLFPPKPKDTLMISRTPEVTCVVVDVSHEDPEVKFNWYVDGVEVHNAKTKPREEQYNSTYRVVSVLTVLHQDWLNGKEYKCKVSNKALPAPIEKTISKAKGQPREPQVYTLPPSRDELTKNQVSLTCLVKGFYPSDIAVEWESFGTEWSNYKTTPPVLDSDGSFFLYSKLTVSKEEWQQGFVFSCSVLHEALHSHYTQKSLSLSPGK

SEQ ID NO: 385 - protein, 217 aa, Artificial Sequence
  source: /note="Description of Artificial Sequence: Synthetic polypeptide"
APELLGGPSVFLFPPKPKDTLMISRTPEVTCVVVDVSHEDPEVKFNWYVDGVEVHNAKTKPREEQYNSTYRVVSVLTVLHQDWLNGKEYKCKVSNKALPAPIEKTISKAKGQPREPQVYTLPPSRDELTKNQVSLWCLVKGFYPSDIAVEWESFGTEWSNYKTTPPVLDSDGSFFLYSKLTVSKEEWQQGFVFSCSVLHEALHSHYTQKSLSLSPGK

SEQ ID NO: 386 - protein, 217 aa, Artificial Sequence
  source: /note="Description of Artificial Sequence: Synthetic polypeptide"
APEAAGGPSVFLFPPKPKDTLMISRTPEVTCVVVDVSHEDPEVKFNWYVDGVEVHNAKTKPREEQYNSTYRVVSVLTVLHQDWLNGKEYKCKVSNKALPAPIEKTISKAKGQPREPQVYTLPPSRDELTKNQVSLWCLVKGFYPSDIAVEWESFGTEWSNYKTTPPVLDSDGSFFLYSKLTVSKEEWQQGFVFSCSVLHEALHSHYTQKSLSLSPGK

SEQ ID NO: 387 - protein, 217 aa, Artificial Sequence
  source: /note="Description of Artificial Sequence: Synthetic polypeptide"
APEAAGGPSVFLFPPKPKDTLMISRTPEVTCVVVDVSHEDPEVKFNWYVDGVEVHNAKTKPREEQYNSTYRVVSVLTVLHQDWLNGKEYKCKVSNKALGAPIEKTISKAKGQPREPQVYTLPPSRDELTKNQVSLWCLVKGFYPSDIAVEWESFGTEWSNYKTTPPVLDSDGSFFLYSKLTVSKEEWQQGFVFSCSVLHEALHSHYTQKSLSLSPGK

SEQ ID NO: 388 - protein, 217 aa, Artificial Sequence
  source: /note="Description of Artificial Sequence: Synthetic polypeptide"
APELLGGPSVFLFPPKPKDTLMISRTPEVTCVVVDVSHEDPEVKFNWYVDGVEVHNAKTKPREEQYNSTYRVVSVLTVLHQDWLNGKEYKCKVSNKALPAPIEKTISKAKGQPREPQVYTLPPSRDELTKNQVSLSCAVKGFYPSDIAVEWESFGTEWSNYKTTPPVLDSDGSFFLVSKLTVSKEEWQQGFVFSCSVLHEALHSHYTQKSLSLSPGK

SEQ ID NO: 389 - protein, 217 aa, Artificial Sequence
  source: /note="Description of Artificial Sequence: Synthetic polypeptide"
APEAAGGPSVFLFPPKPKDTLMISRTPEVTCVVVDVSHEDPEVKFNWYVDGVEVHNAKTKPREEQYNSTYRVVSVLTVLHQDWLNGKEYKCKVSNKALPAPIEKTISKAKGQPREPQVYTLPPSRDELTKNQVSLSCAVKGFYPSDIAVEWESFGTEWSNYKTTPPVLDSDGSFFLVSKLTVSKEEWQQGFVFSCSVLHEALHSHYTQKSLSLSPGK

SEQ ID NO: 390 - protein, 217 aa, Artificial Sequence
  source: /note="Description of Artificial Sequence: Synthetic polypeptide"
APEAAGGPSVFLFPPKPKDTLMISRTPEVTCVVVDVSHEDPEVKFNWYVDGVEVHNAKTKPREEQYNSTYRVVSVLTVLHQDWLNGKEYKCKVSNKALGAPIEKTISKAKGQPREPQVYTLPPSRDELTKNQVSLSCAVKGFYPSDIAVEWESFGTEWSNYKTTPPVLDSDGSFFLVSKLTVSKEEWQQGFVFSCSVLHEALHSHYTQKSLSLSPGK

SEQ ID NO: 391 - protein, 217 aa, Artificial Sequence
  source: /note="Description of Artificial Sequence: Synthetic polypeptide"
APELLGGPSVFLFPPKPKDTLMISRTPEVTCVVVDVSHEDPEVKFNWYVDGVEVHNAKTKPREEQYNSTYRVVSVLTVLHQDWLNGKEYKCKVSNKALPAPIEKTISKAKGQPREPQVYTLPPSRDELTKNQVSLWCLVKGFYPSDIAVEWESNGQPENNYKTTPPVLDSDGSFFLYSKLTVDKSRWQQGNVFSCSVMHEALHNHYTQKSLSLSPGK

SEQ ID NO: 392 - protein, 217 aa, Artificial Sequence
  source: /note="Description of Artificial Sequence: Synthetic polypeptide"
APEAAGGPSVFLFPPKPKDTLMISRTPEVTCVVVDVSHEDPEVKFNWYVDGVEVHNAKTKPREEQYNSTYRVVSVLTVLHQDWLNGKEYKCKVSNKALPAPIEKTISKAKGQPREPQVYTLPPSRDELTKNQVSLWCLVKGFYPSDIAVEWESNGQPENNYKTTPPVLDSDGSFFLYSKLTVDKSRWQQGNVFSCSVMHEALHNHYTQKSLSLSPGK

SEQ ID NO: 393 - protein, 217 aa, Artificial Sequence
  source: /note="Description of Artificial Sequence: Synthetic polypeptide"
APEAAGGPSVFLFPPKPKDTLMISRTPEVTCVVVDVSHEDPEVKFNWYVDGVEVHNAKTKPREEQYNSTYRVVSVLTVLHQDWLNGKEYKCKVSNKALGAPIEKTISKAKGQPREPQVYTLPPSRDELTKNQVSLWCLVKGFYPSDIAVEWESNGQPENNYKTTPPVLDSDGSFFLYSKLTVDKSRWQQGNVFSCSVMHEALHNHYTQKSLSLSPGK

SEQ ID NO: 394 - protein, 217 aa, Artificial Sequence
  source: /note="Description of Artificial Sequence: Synthetic polypeptide"
APELLGGPSVFLFPPKPKDTLYITREPEVTCVVVDVSHEDPEVKFNWYVDGVEVHNAKTKPREEQYNSTYRVVSVLTVLHQDWLNGKEYKCKVSNKALPAPIEKTISKAKGQPREPQVYTLPPSRDELTKNQVSLWCLVKGFYPSDIAVEWESNGQPENNYKTTPPVLDSDGSFFLYSKLTVDKSRWQQGNVFSCSVMHEALHNHYTQKSLSLSPGK

SEQ ID NO: 395 - protein, 217 aa, Artificial Sequence
  source: /note="Description of Artificial Sequence: Synthetic polypeptide"
APEAAGGPSVFLFPPKPKDTLYITREPEVTCVVVDVSHEDPEVKFNWYVDGVEVHNAKTKPREEQYNSTYRVVSVLTVLHQDWLNGKEYKCKVSNKALPAPIEKTISKAKGQPREPQVYTLPPSRDELTKNQVSLWCLVKGFYPSDIAVEWESNGQPENNYKTTPPVLDSDGSFFLYSKLTVDKSRWQQGNVFSCSVMHEALHNHYTQKSLSLSPGK

SEQ ID NO: 396 - protein, 217 aa, Artificial Sequence
  source: /note="Description of Artificial Sequence: Synthetic polypeptide"
APEAAGGPSVFLFPPKPKDTLYITREPEVTCVVVDVSHEDPEVKFNWYVDGVEVHNAKTKPREEQYNSTYRVVSVLTVLHQDWLNGKEYKCKVSNKALGAPIEKTISKAKGQPREPQVYTLPPSRDELTKNQVSLWCLVKGFYPSDIAVEWESNGQPENNYKTTPPVLDSDGSFFLYSKLTVDKSRWQQGNVFSCSVMHEALHNHYTQKSLSLSPGK

SEQ ID NO: 397 - protein, 217 aa, Artificial Sequence; identical to SEQ ID NO: 251
  source: /note="Description of Artificial Sequence: Synthetic polypeptide"

SEQ ID NO: 398 - protein, 217 aa, Artificial Sequence; identical to SEQ ID NO: 253
  source: /note="Description of Artificial Sequence: Synthetic polypeptide"

SEQ ID NO: 399 - protein, 217 aa, Artificial Sequence
  source: /note="Description of Artificial Sequence: Synthetic polypeptide"
APEAAGGPSVFLFPPKPKDTLMISRTPEVTCVVVDVSHEDPEVKFNWYVDGVEVHNAKTKPREEQYNSTYRVVSVLTVLHQDWLNGKEYKCKVSNKALGAPIEKTISKAKGQPREPQVYTLPPSRDELTKNQVSLSCAVKGFYPSDIAVEWESNGQPENNYKTTPPVLDSDGSFFLVSKLTVDKSRWQQGNVFSCSVMHEALHNHYTQKSLSLSPGK

SEQ ID NO: 400 - protein, 217 aa, Artificial Sequence
  source: /note="Description of Artificial Sequence: Synthetic polypeptide"
APELLGGPSVFLFPPKPKDTLYITREPEVTCVVVDVSHEDPEVKFNWYVDGVEVHNAKTKPREEQYNSTYRVVSVLTVLHQDWLNGKEYKCKVSNKALPAPIEKTISKAKGQPREPQVYTLPPSRDELTKNQVSLSCAVKGFYPSDIAVEWESNGQPENNYKTTPPVLDSDGSFFLVSKLTVDKSRWQQGNVFSCSVMHEALHNHYTQKSLSLSPGK

SEQ ID NO: 401 - protein, 217 aa, Artificial Sequence
  source: /note="Description of Artificial Sequence: Synthetic polypeptide"
APEAAGGPSVFLFPPKPKDTLYITREPEVTCVVVDVSHEDPEVKFNWYVDGVEVHNAKTKPREEQYNSTYRVVSVLTVLHQDWLNGKEYKCKVSNKALPAPIEKTISKAKGQPREPQVYTLPPSRDELTKNQVSLSCAVKGFYPSDIAVEWESNGQPENNYKTTPPVLDSDGSFFLVSKLTVDKSRWQQGNVFSCSVMHEALHNHYTQKSLSLSPGK

SEQ ID NO: 402 - protein, 217 aa, Artificial Sequence
  source: /note="Description of Artificial Sequence: Synthetic polypeptide"
APEAAGGPSVFLFPPKPKDTLYITREPEVTCVVVDVSHEDPEVKFNWYVDGVEVHNAKTKPREEQYNSTYRVVSVLTVLHQDWLNGKEYKCKVSNKALGAPIEKTISKAKGQPREPQVYTLPPSRDELTKNQVSLSCAVKGFYPSDIAVEWESNGQPENNYKTTPPVLDSDGSFFLVSKLTVDKSRWQQGNVFSCSVMHEALHNHYTQKSLSLSPGK

SEQ ID NO: 403 - protein, 217 aa, Artificial Sequence
  source: /note="Description of Artificial Sequence: Synthetic polypeptide"
APELLGGPSVFLFPPKPKDTLMISRTPEVTCVVVDVSHEDPEVKFNWYVDGVEVHNAKTKPREEQYNSTYRVVSVLTVLHQDWLNGKEYKCKVSNKALPAPIEKTISKAKGQPREPQVYTLPPSRDELTKNQVSLTCLVKGFYPSDIAVEWESNGQPENNYKTTPPVLDSDGSFFLYSKLTVDKSRWQQGNVFSCSVLHEALHSHYTQKSLSLSPGK

SEQ ID NO: 404 - protein, 217 aa, Artificial Sequence
  source: /note="Description of Artificial Sequence: Synthetic polypeptide"
APELLGGPSVFLFPPKPKDTLMISRTPEVTCVVVDVSHEDPEVKFNWYVDGVEVHNAKTKPREEQYNSTYRVVSVLTVLHQDWLNGKEYKCKVSNKALPAPIEKTISKAKGQPREPQVYTLPPSRDELTKNQVSLWCLVKGFYPSDIAVEWESNGQPENNYKTTPPVLDSDGSFFLYSKLTVDKSRWQQGNVFSCSVLHEALHSHYTQKSLSLSPGK

SEQ ID NO: 405 - protein, 217 aa, Artificial Sequence
  source: /note="Description of Artificial Sequence: Synthetic polypeptide"
APEAAGGPSVFLFPPKPKDTLMISRTPEVTCVVVDVSHEDPEVKFNWYVDGVEVHNAKTKPREEQYNSTYRVVSVLTVLHQDWLNGKEYKCKVSNKALPAPIEKTISKAKGQPREPQVYTLPPSRDELTKNQVSLWCLVKGFYPSDIAVEWESNGQPENNYKTTPPVLDSDGSFFLYSKLTVDKSRWQQGNVFSCSVLHEALHSHYTQKSLSLSPGK

SEQ ID NO: 406 - protein, 217 aa, Artificial Sequence
  source: /note="Description of Artificial Sequence: Synthetic polypeptide"
APEAAGGPSVFLFPPKPKDTLMISRTPEVTCVVVDVSHEDPEVKFNWYVDGVEVHNAKTKPREEQYNSTYRVVSVLTVLHQDWLNGKEYKCKVSNKALGAPIEKTISKAKGQPREPQVYTLPPSRDELTKNQVSLWCLVKGFYPSDIAVEWESNGQPENNYKTTPPVLDSDGSFFLYSKLTVDKSRWQQGNVFSCSVLHEALHSHYTQKSLSLSPGK

SEQ ID NO: 407 - protein, 217 aa, Artificial Sequence
  source: /note="Description of Artificial Sequence: Synthetic polypeptide"
APELLGGPSVFLFPPKPKDTLMISRTPEVTCVVVDVSHEDPEVKFNWYVDGVEVHNAKTKPREEQYNSTYRVVSVLTVLHQDWLNGKEYKCKVSNKALPAPIEKTISKAKGQPREPQVYTLPPSRDELTKNQVSLSCAVKGFYPSDIAVEWESNGQPENNYKTTPPVLDSDGSFFLVSKLTVDKSRWQQGNVFSCSVLHEALHSHYTQKSLSLSPGK

SEQ ID NO: 408 - protein, 217 aa, Artificial Sequence
  source: /note="Description of Artificial Sequence: Synthetic polypeptide"
APEAAGGPSVFLFPPKPKDTLMISRTPEVTCVVVDVSHEDPEVKFNWYVDGVEVHNAKTKPREEQYNSTYRVVSVLTVLHQDWLNGKEYKCKVSNKALPAPIEKTISKAKGQPREPQVYTLPPSRDELTKNQVSLSCAVKGFYPSDIAVEWESNGQPENNYKTTPPVLDSDGSFFLVSKLTVDKSRWQQGNVFSCSVLHEALHSHYTQKSLSLSPGK

SEQ ID NO: 409 - protein, 217 aa, Artificial Sequence
  source: /note="Description of Artificial Sequence: Synthetic polypeptide"
APEAAGGPSVFLFPPKPKDTLMISRTPEVTCVVVDVSHEDPEVKFNWYVDGVEVHNAKTKPREEQYNSTYRVVSVLTVLHQDWLNGKEYKCKVSNKALGAPIEKTISKAKGQPREPQVYTLPPSRDELTKNQVSLSCAVKGFYPSDIAVEWESNGQPENNYKTTPPVLDSDGSFFLVSKLTVDKSRWQQGNVFSCSVLHEALHSHYTQKSLSLSPGK

SEQ ID NO: 410 - protein, 451 aa, Artificial Sequence
  source: /note="Description of Artificial Sequence: Synthetic polypeptide"
QVQLQQPGAELVKPGASVKMSCKASGYTFTSYNMHWVKQTPGRGLEWIGAIYPGNGDTSYNQKFKGKATLTADKSSSTAYMQLSSLTSEDSAVYYCARSTYYGGDWYFNVWGAGTTVTVSAASTKGPSVFPLAPSSKSTSGGTAALGCLVKDYFPEPVTVSWNSGALTSGVHTFPAVLQSSGLYSLSSVVTVPSSSLGTQTYICNVNHKPSNTKVDKKVEPKSCDKTHTCPPCPAPELLGGPSVFLFPPKPKDTLMISRTPEVTCVVVDVSHEDPEVKFNWYVDGVEVHNAKTKPREEQYNSTYRVVSVLTVLHQDWLNGKEYKCKVSNKALPAPIEKTISKAKGQPREPQVYTLPPSRDELTKNQVSLWCLVKGFYPSDIAVEWESYGTEWSNYKTTPPVLDSDGSFFLYSKLTVTKEEWQQGFVFSCSVMHEALHNHYTQKSLSLSPGK

SEQ ID NO: 411 - protein, 451 aa, Artificial Sequence
  source: /note="Description of Artificial Sequence: Synthetic polypeptide"
QVQLQQPGAELVKPGASVKMSCKASGYTFTSYNMHWVKQTPGRGLEWIGAIYPGNGDTSYNQKFKGKATLTADKSSSTAYMQLSSLTSEDSAVYYCARSTYYGGDWYFNVWGAGTTVTVSAASTKGPSVFPLAPSSKSTSGGTAALGCLVKDYFPEPVTVSWNSGALTSGVHTFPAVLQSSGLYSLSSVVTVPSSSLGTQTYICNVNHKPSNTKVDKKVEPKSCDKTHTCPPCPAPEAAGGPSVFLFPPKPKDTLMISRTPEVTCVVVDVSHEDPEVKFNWYVDGVEVHNAKTKPREEQYNSTYRVVSVLTVLHQDWLNGKEYKCKVSNKALPAPIEKTISKAKGQPREPQVYTLPPSRDELTKNQVSLWCLVKGFYPSDIAVEWESYGTEWSNYKTTPPVLDSDGSFFLYSKLTVTKEEWQQGFVFSCSVMHEALHNHYTQKSLSLSPGK

SEQ ID NO: 412 - protein, 451 aa, Artificial Sequence
  source: /note="Description of Artificial Sequence: Synthetic polypeptide"
QVQLQQPGAELVRPGTSVKLSCKASGYTFTSYWMHWIKQRPGQGLEWIGVIDPSDNYTKYNQKFKGKATLTVDTSSSTAYMQLSSLTSEDSAVYFCAREGYYGSSPWFAYWGQGTLVTVSSASTKGPSVFPLAPSSKSTSGGTAALGCLVKDYFPEPVTVSWNSGALTSGVHTFPAVLQSSGLYSLSSVVTVPSSSLGTQTYICNVNHKPSNTKVDKKVEPKSCDKTHTCPPCPAPELLGGPSVFLFPPKPKDTLMISRTPEVTCVVVDVSHEDPEVKFNWYVDGVEVHNAKTKPREEQYNSTYRVVSVLTVLHQDWLNGKEYKCKVSNKALPAPIEKTISKAKGQPREPQVYTLPPSRDELTKNQVSLWCLVKGFYPSDIAVEWESYGTEWSNYKTTPPVLDSDGSFFLYSKLTVTKEEWQQGFVFSCSVMHEALHNHYTQKSLSLSPGK

SEQ ID NO: 413 - protein, 451 aa, Artificial Sequence
  source: /note="Description of Artificial Sequence: Synthetic polypeptide"
QVQLQQPGAELVRPGTSVKLSCKASGYTFTSYWMHWIKQRPGQGLEWIGVIDPSDNYTKYNQKFKGKATLTVDTSSSTAYMQLSSLTSEDSAVYFCAREGYYGSSPWFAYWGQGTLVTVSSASTKGPSVFPLAPSSKSTSGGTAALGCLVKDYFPEPVTVSWNSGALTSGVHTFPAVLQSSGLYSLSSVVTVPSSSLGTQTYICNVNHKPSNTKVDKKVEPKSCDKTHTCPPCPAPEAAGGPSVFLFPPKPKDTLMISRTPEVTCVVVDVSHEDPEVKFNWYVDGVEVHNAKTKPREEQYNSTYRVVSVLTVLHQDWLNGKEYKCKVSNKALPAPIEKTISKAKGQPREPQVYTLPPSRDELTKNQVSLWCLVKGFYPSDIAVEWESYGTEWSNYKTTPPVLDSDGSFFLYSKLTVTKEEWQQGFVFSCSVMHEALHNHYTQKSLSLSPGK

SEQ ID NO: 414 - protein, 7 aa, Artificial Sequence
  source: /note="Description of Artificial Sequence: Synthetic peptide"
  MOD_RES (2)..(2): Any amino acid
YXTEWSS

SEQ ID NO: 415 - protein, 9 aa, Artificial Sequence
  source: /note="Description of Artificial Sequence: Synthetic peptide"
  MOD_RES (2)..(3): Any amino acid
  MOD_RES (5)..(8): Any amino acid
TXXEXXXXF

SEQ ID NO: 416 - protein, 454 aa, Artificial Sequence
  source: /note="Description of Artificial Sequence: Synthetic polypeptide"
QVQLVESGGGVVQPGRSLRLSCAASGFAFSSYGMHWVRQAPGKGLEWVAVIWFDGTKKYYTDSVKGRFTISRDNSKNTLYLQMNTLRAEDTAVYYCARDRGIGARRGPYYMDVWGKGTTVTVSSASTKGPSVFPLAPSSKSTSGGTAALGCLVKDYFPEPVTVSWNSGALTSGVHTFPAVLQSSGLYSLSSVVTVPSSSLGTQTYICNVNHKPSNTKVDKKVEPKSCDKTHTCPPCPAPELLGGPSVFLFPPKPKDTLMISRTPEVTCVVVDVSHEDPEVKFNWYVDGVEVHNAKTKPREEQYNSTYRVVSVLTVLHQDWLNGKEYKCKVSNKALPAPIEKTISKAKGQPREPQVYTLPPSRDELTKNQVSLTCLVKGFYPSDIAVEWESNGQPENNYKTTPPVLDSDGSFFLYSKLTVDKSRWQQGNVFSCSVMHEALHNHYTQKSLSLSPGK

SEQ ID NO: 417 - protein, 454 aa, Artificial Sequence
  source: /note="Description of Artificial Sequence: Synthetic polypeptide"
QVQLVESGGGVVQPGRSLRLSCAASGFAFSSYGMHWVRQAPGKGLEWVAVIWFDGTKKYYTDSVKGRFTISRDNSKNTLYLQMNTLRAEDTAVYYCARDRGIGARRGPYYMDVWGKGTTVTVSSASTKGPSVFPLAPSSKSTSGGTAALGCLVKDYFPEPVTVSWNSGALTSGVHTFPAVLQSSGLYSLSSVVTVPSSSLGTQTYICNVNHKPSNTKVDKKVEPKSCDKTHTCPPCPAPEAAGGPSVFLFPPKPKDTLMISRTPEVTCVVVDVSHEDPEVKFNWYVDGVEVHNAKTKPREEQYNSTYRVVSVLTVLHQDWLNGKEYKCKVSNKALPAPIEKTISKAKGQPREPQVYTLPPSRDELTKNQVSLWCLVKGFYPSDIAVEWESYGTEWSNYKTTPPVLDSDGSFFLYSKLTVSKEEWQQGFVFSCSVMHEALHNHYTQKSLSLSPGK

SEQ ID NO: 418 - protein, 454 aa, Artificial Sequence
  source: /note="Description of Artificial Sequence: Synthetic polypeptide"
QVQLVESGGGVVQPGRSLRLSCAASGFAFSSYGMHWVRQAPGKGLEWVAVIWFDGTKKYYTDSVKGRFTISRDNSKNTLYLQMNTLRAEDTAVYYCARDRGIGARRGPYYMDVWGKGTTVTVSSASTKGPSVFPLAPSSKSTSGGTAALGCLVKDYFPEPVTVSWNSGALTSGVHTFPAVLQSSGLYSLSSVVTVPSSSLGTQTYICNVNHKPSNTKVDKKVEPKSCDKTHTCPPCPAPEAAGGPSVFLFPPKPKDTLMISRTPEVTCVVVDVSHEDPEVKFNWYVDGVEVHNAKTKPREEQYNSTYRVVSVLTVLHQDWLNGKEYKCKVSNKALPAPIEKTISKAKGQPREPQVYTLPPSRDELTKNQVSLSCAVKGFYPSDIAVEWESNGQPENNYKTTPPVLDSDGSFFLVSKLTVDKSRWQQGNVFSCSVMHEALHNHYTQKSLSLSPGK

SEQ ID NO: 419 - protein, 454 aa, Artificial Sequence
  source: /note="Description of Artificial Sequence: Synthetic polypeptide"
QVQLVESGGGVVQPGRSLRLSCAASGFAFSSYGMHWVRQAPGKGLEWVAVIWFDGTKKYYTDSVKGRFTISRDNSKNTLYLQMNTLRAEDTAVYYCARDRGIGARRGPYYMDVWGKGTTVTVSSASTKGPSVFPLAPSSKSTSGGTAALGCLVKDYFPEPVTVSWNSGALTSGVHTFPAVLQSSGLYSLSSVVTVPSSSLGTQTYICNVNHKPSNTKVDKKVEPKSCDKTHTCPPCPAPELLGGPSVFLFPPKPKDTLMISRTPEVTCVVVDVSHEDPEVKFNWYVDGVEVHNAKTKPREEQYNSTYRVVSVLTVLHQDWLNGKEYKCKVSNKALPAPIEKTISKAKGQPREPQVYTLPPSRDELTKNQVSLSCAVKGFYPSDIAVEWESNGQPENNYKTTPPVLDSDGSFFLVSKLTVDKSRWQQGNVFSCSVMHEALHNHYTQKSLSLSPGK

SEQ ID NO: 420 - protein, 214 aa, Artificial Sequence
  source: /note="Description of Artificial Sequence: Synthetic polypeptide"
DIQMTQSPSSLSASVGDRVTITCRASQSISSYLNWYQQKPGKAPKLLIYAASSLQSGVPSRFSGSGSGTDFTLTISSLQPEDFATYYCQQSYSTPLTFGGGTKVEIKRTVAAPSVFIFPPSDEQLKSGTASVVCLLNNFYPREAKVQWKVDNALQSGNSQESVTEQDSKDSTYSLSSTLTLSKADYEKHKVYACEVTHQGLSSPVTKSFNRGEC

SEQ ID NO: 421 - protein, 6 aa, Artificial Sequence
  source: /note="Description of Artificial Sequence: Synthetic 6xHis tag"
HHHHHH

1. A modified Fc polypeptide dimer, or a dimeric fragment thereof, that:
(a) specifically binds TfR;
(b) is capable of binding an Fcγ receptor (FcγR); and
(c) does not substantially deplete reticulocytes in vivo.

2. A modified Fc polypeptide dimer, or a dimeric fragment thereof, comprising:
(a) a first Fc polypeptide that specifically binds TfR comprising (i) a TfR-binding site and (ii) one or more amino acid modifications that reduce FcγR binding when bound to TfR; and
(b) a second Fc polypeptide that does not contain a TfR-binding site or any modifications that reduce FcγR binding.

3. The modified Fc polypeptide dimer of claim 1, wherein the first Fc polypeptide comprises a modified CH3 domain comprising the TfR-binding site.

4. (canceled)

5. The modified Fc polypeptide dimer of claim 3, wherein the modified CH3 domain comprises five, six, seven, eight, or nine substitutions in a set of amino acid positions comprising 384, 386, 387, 388, 389, 390, 413, 416, and 421, according to EU numbering.

6. The modified Fc polypeptide dimer of claim 5, wherein the modified CH3 domain further comprises one, two, three, or four substitutions at positions comprising 380, 391, 392, and 415.

7. (canceled)

8. The modified Fc polypeptide dimer of claim 2, wherein the modified Fc polypeptide dimer binds to the apical domain of TfR, and/or
wherein the modified Fc polypeptide dimer binds to TfR without inhibiting binding of transferrin to TfR, and/or
wherein the modified Fc polypeptide dimer binds to an epitope that comprises amino acid 208 of TfR.

9-10. (canceled)

11. The modified Fc polypeptide dimer of claim 5, wherein the modified CH3 domain comprises Trp at position 388, and/or Trp or Phe at position 421.

12-14. (canceled)

15. The modified Fc polypeptide dimer of claim 5, wherein the modified CH3 domain comprises one, two, three, four, five, six, seven, or eight positions selected from the following: position 384 is Leu, Tyr, Met, or Val; position 386 is Leu, Thr, His, or Pro; position 387 is Val, Pro, or an acidic amino acid; position 388 is Trp; position 389 is Val, Ser, or Ala; position 413 is Glu, Ala, Ser, Leu, Thr, or Pro; position 416 is Thr or an acidic amino acid; and position 421 is Trp, Tyr, His, or Phe.

16-21. (canceled)

22. The modified Fc polypeptide dimer of claim 5, wherein:
(a) the modified CH3 domain comprises Tyr at position 384, Thr at position 386, Glu or Val and position 387, Trp at position 388, Ser at position 389, Ser or Thr at position 413, Glu at position 416, and/or Phe at position 421; or
(b) the modified CH3 domain comprises Tyr at position 384, Thr at position 386, Glu or Val and position 387, Trp at position 388, Ser at position 389, Ser or Thr at position 413, Glu at position 415, Glu at position 416, and/or Phe at position 421, or
(c) the modified CH3 domain comprises Tyr at position 384, Thr at position 386, Glu or Val and position 387, Trp at position 388, Ser at position 389, Asn at position 390, Ser or Thr at position 413, Glu at position 416, and/or Phe at position 421, or
(d) the modified CH3 domain comprises Tyr at position 384, Thr at position 386, Glu or Val and position 387, Trp at position 388, Ser at position 389, Asn at position 390, Ser or Thr at position 413, Glu at position 415, Glu at position 416, and/or Phe at position 421.

23-27. (canceled)

28. The modified Fc polypeptide dimer of claim 5, wherein the modified CH3 domain has at least 85% identity to amino acids 111-217 of any one of SEQ ID NOS:13, 24-29, 64-69, and 76-127.

29. The modified Fc polypeptide dimer of claim 28, wherein the modified CH3 domain has at least 85% identity to amino acids 111-217 of any one of SEQ ID NOS:66, 68, 94, 107-109, 119, and 268-270.

30. The modified Fc polypeptide dimer of claim 5, wherein the modified CH3 domain has at least 85% identity to amino acids 111-217 of SEQ ID NO:1 with the proviso that the percent identity does not include the set of positions 384, 386, 387, 388, 389, 390, 413, 416, and 421, according to EU numbering.

31-32. (canceled)

33. The modified Fc polypeptide dimer of claim 6, wherein the modified CH3 domain comprises 1, 2, 3, 4, 5, 6, 7, 8, 9, 10, or 11 positions selected from the following: position 380 is Trp, Leu, or Glu; position 384 is Tyr or Phe; position 386 is Thr; position 387 is Glu; position 388 is Trp; position 389 is Ser, Ala, Val, or Asn; position 390 is Ser or Asn; position 413 is Thr or Ser; position 415 is Glu or Ser; position 416 is Glu; and position 421 is Phe.

34-40. (canceled)

41. The modified Fc polypeptide dimer of claim 2, wherein the amino acid modifications that reduce FcγR binding when bound to TfR comprise Ala at position 234 and at position 235, according to EU numbering scheme.

42. The modified Fc polypeptide dimer of claim 2, wherein the first Fc polypeptide and/or the second Fc polypeptide comprises amino acid modifications comprising (i) a Leu at position 428 and a Ser at position 434, or (ii) a Ser or Ala at position 434, according to EU numbering scheme.

43. (canceled)

44. The modified Fc polypeptide dimer of claim 2, wherein the first Fc polypeptide and/or the second Fc polypeptide is further fused to a Fab.

45. The modified Fc polypeptide dimer of claim 2, wherein the first Fc polypeptide comprises a knob mutation T366W and the second Fc polypeptide comprises hole mutations T366S, L368A, and Y407V, according to EU numbering scheme; or
wherein the first Fc polypeptide comprises hole mutations T366S, L368A, and Y407V and the second Fc polypeptide comprises a knob mutation T366W, according to EU numbering scheme.

46-70. (canceled)

71. The modified Fc polypeptide dimer of claim 2, wherein:
(A) the modified Fc polypeptide dimer does not substantially deplete reticulocytes;
(b) an amount of reticulocytes depleted after administering the modified Fc polypeptide dimer is less than an amount of reticulocytes depleted after administering a control;
(c) an amount of reticulocytes remaining after administering the modified Fc polypeptide dimer is more than an amount of reticulocytes remaining after administering a control;
(d) the modified Fc polypeptide dimer does not substantially deplete reticulocytes in bone marrow;
(e) an amount of reticulocytes depleted in bone marrow after administering the modified Fc polypeptide dimer is less than an amount of reticulocytes depleted in bone marrow after administering a control; and/or
(f) an amount of reticulocytes remaining in bone marrow after administering the modified Fc polypeptide dimer is more than an amount of reticulocytes remaining in bone marrow after administering a control.

72-80. (canceled)

81. The modified Fc polypeptide dimer of claim 71, wherein the control is a corresponding TfR-binding Fc dimer with full effector function and/or contains no mutations that reduce FcγR binding.

82. An Fc polypeptide dimer-Fab fusion protein that is capable of being actively transported across the BBB, the Fc polypeptide dimer-Fab fusion protein comprising:
(a) an antibody variable region that is capable of binding an antigen, or antigen-binding fragment thereof; and
(b) a modified Fc polypeptide dimer comprising (i) a first Fc polypeptide that specifically binds TfR comprising a TfR-binding site and one or more amino acid modifications that reduce FcγR binding when bound to TfR, and (ii) a second Fc polypeptide that does not contain a TfR-binding site or any modifications that reduce FcγR binding.

83. The Fc polypeptide dimer-Fab fusion protein of claim 82, wherein the amino acid modifications that reduce FcγR binding when bound to TfR comprise Ala at position 234 and at position 235, according to EU numbering scheme; and/or
wherein the first Fc polypeptide and/or the second Fc polypeptide comprises amino acid modifications comprising (i) a Leu at position 428 and a Ser at position 434, or (ii) a Ser or Ala at position 434, according to EU numbering scheme.

84-87. (canceled)

88. A pharmaceutical composition comprising the modified Fc polypeptide dimer of claim 2 and a pharmaceutically acceptable carrier.

89. (canceled)

90. A method of transcytosis of a composition across an endothelium, comprising contacting the endothelium with a composition comprising a modified Fc polypeptide dimer of claim 2.

91. (canceled)

92. The method of claim 90, wherein the endothelium is the BBB.

93. An Fc polypeptide dimer-Fab fusion protein that is capable of being actively transported across the BBB, the Fc polypeptide dimer-Fab fusion protein comprising:
(a) an antibody variable region that is capable of binding an antigen, or antigen-binding fragment thereof; and
(b) a modified Fc polypeptide dimer comprising (i) a first Fc polypeptide that specifically binds TfR comprising the sequence of SEQ ID NO:214, and (ii) a second Fc polypeptide comprising the sequence of SEQ ID NO:397.

94. An Fc polypeptide dimer-Fab fusion protein that is capable of being actively transported across the BBB, the Fc polypeptide dimer-Fab fusion protein comprising:
(a) an antibody variable region that is capable of binding an antigen, or antigen-binding fragment thereof; and
(b) a modified Fc polypeptide dimer comprising (i) a first Fc polypeptide that specifically binds TfR comprising the sequence of SEQ ID NO:344, and (ii) a second Fc polypeptide comprising the sequence of SEQ ID NO:407.

95. An Fc polypeptide dimer-Fab fusion protein that is capable of being actively transported across the BBB, the Fc polypeptide dimer-Fab fusion protein comprising:
(a) an antibody variable region that is capable of binding an antigen, or antigen-binding fragment thereof; and
(b) a modified Fc polypeptide dimer comprising (i) a first Fc polypeptide that specifically binds TfR comprising the sequence of SEQ ID NO:202, and (ii) a second Fc polypeptide comprising the sequence of SEQ ID NO:397.

96. An Fc polypeptide dimer-Fab fusion protein that is capable of being actively transported across the BBB, the Fc polypeptide dimer-Fab fusion protein comprising:
(a) an antibody variable region that is capable of binding an antigen, or antigen-binding fragment thereof; and
(b) a modified Fc polypeptide dimer comprising (i) a first Fc polypeptide that specifically binds TfR comprising the sequence of SEQ ID NO:337, and (ii) a second Fc polypeptide comprising the sequence of SEQ ID NO:407.
